United States Patent Application Publication US 2025/0051766 A1 - sequence listing, part 6

SEQ ID NO: 5065 - DNA, 58617616 bp, Homo sapiens (residues 8,684,093-10,855,115 of 58,617,616)
  source 1..58617616: mol_type = genomic DNA
ccctttttgcgtgggagacacagcatatgcgtgttcacgtatgtgctcagatcagggcgtgtaggtgtgggcatgatacctacatgtatacacatgtgtgcttgagcctgggggtgaaggaaccgcctcaagtctctccatatgcccccccacaagccgtgttgtggggctgaagccttgcggaggatgtaggggatgggggagagttgagttccctcccctaaggccactggtgtgccccctcccccatcaccccatctctcccgcctatgaaggacctgggagcagccccagcctcccctctcccccatactgtaaattctgagaaatcctgtcctgtggtttggcctaggccgtcctcgcccgccttcgtccccagcagggctgccctggccactgtcttcctgtcttggggcctgggtttggggtcatggggaaagactaagaacccccgtcccagcctgggttcttagacagaggggagagggctctgccctgcttctcacgactttgctttgcctctctgggcctcagtttcctcttctacagaatggggataattgtagttcctaccccccgagggctgtgggagaagtcgaggaggtgacacccacggggaggtgagagctgagtctggcaggtcctaacgcacctgctacatgctggctgtcactgttattcattttctgcatcttgctttactccagactccacacttttatcctcgctgttcccttacacagaatgtcctcatccctctcctccttggcaaacccaggaataatccaaatcctaactcaaattccatttcctccggaaacaggggagggtggtgagatgagctggatctggcaggcaggaaacctgggatctcaactctgccacggacatgctggatggctttgagcaggccactgtgccacaccgtgactcagtttccccattcgagctctgatgctccagggtttttttttttttgagtctctttttttttgagtctcttttttttttttgagtctcttttttttttgagtctcttttttttttttgagatggagtctcgcactgttgccaggctggagtgcagtggtgcgatctctgctcactgcaacctccccttcgtgggttcaagcgattctcctgcctcagcctcccaagtagctgggattacaggcatgtgccaccatgcctggataatttttgtatttttagtagagatggggtttcaccatgtaggccaggcttgtctcgaactgaggtcagttgatctgcctgccttggcctcccaaagtgctgggattataggcgtgagccattgcacctggcccgcagtgttccttttttttttttttaatgttttcttttttcttgacacatggtcttgctctgtcacccaggcagtggcatgatcatagctcactgcagccttgaactcctggctcaagtgatcctcccacctcagcctcccaagtaactgggactacaggcgtgtgccaccatgccaggctaattttttagcttttgtagagtcagggtcttgctgtgttgctcaggctggttgcaaactcctgagctcaactgattctcctgcctctgcctcccagtgttgggattacaggtataaggcactgcacctggtacttggtgtcaaattgtaaaatgaagccaagcttgcccctgcatctgctcagcctgaattggtggcctcaacatcatctctgctgggttcatcatttccctagtggaataaccctgtcttctccaaatacttcctctcctgggcctcgcaataaacaggggccctctctctctgctcaaacccttgagagagggtgtccaggtcctgggttgctgtctgtctgtctgtctgtctggagggtgagtccaaggctggactcgggggtccgtctttggcacgatctagttgcaacagcagccccaccatctgttgagagcttgctgtgtactaagcatgctaagtccacttcatgcattagtcaaaaagcagttttaaaaatttatgtctggccaggcgcggtggctcacgcctgtaatcccaggactttgggaggccgaggcgagcagatcatttgaggttaggaattcgagatcagcctggccaacatggtgaaacgctgtttctactaaaaatacaaaaattaggctgggtgtggtggcagcgcctgtaatcccagctactcaggaggctgaggtaggagaatcgcttggacccaggaggcagaggttgcagtgagctgagattgcaccaccgcactccagcctgagtgatagagtgagactcagtctccaaaaaaaaaaaaaaaaaaaaaaaaatattatgtctatggaggcatttgcatcataaaacattcaaacaattacattcatatataaactcaaaagattccagcctcccatcttaaaggtgactgaaatttaagagatgtccttctacactgcccagagagcctgcatgagctcattttatcttcataaaactcccctgaagtgagcgctgacatggctgtatttttcaggtgaggctcagagaggtcaggccacttgtctaaggtcacacagcgtgggaggaagctgcctggaacccaggcctgtctgactccaatgcccaaggaagagaggggaagtggcctcccacggaagaggattcttcttggctcattcattcagtcactcaatgatgtttgaatgttttgaatcattcagtcattcaacaaacatgtattgggcatgactgtgtgatgagtgctgttgaaactggggacatagcagtgacacggggggggcctgtcctcatggaactcgtgatagggatggtgacaccattgattaacaagaaattaaacagaaatttgatggtcacaactagggagaagattaggaaggaaaaagaactgtctgggtggacaccagaggaacctaaagcaaacatccatattttaaaatatactcatggccaggcatggtggctcacatctgtaatcccagcactttgggaggctgaggcaggaggattgctggagctgaggaattcgaaaccagcctgggtgacatagtgagaccctatctctacataaaattaaaaaaaaaaatccagatgtgggggcatgtgcctgtagtgccagctactcagagggctgaggtgggaggattgcttgagctgggttggaggaggttataatcatggctgcagtgagccgtgactgtgccactgtacccagcctgggcaacagagtgagaccctgtctcaaaaaaaaatatgtattacatatttatattcacatggttcaaaatgtaaatacttcagttgggcagctatgcaatatatccatcatattaaactttcatggcaggggaggaactaggataaacatgtttaaaaagcctccttaggggtaataatgaaatgaaagctgagaaacactggcatagaagctgccgccgttcaatttttctttttgtgatctttgagatagtctagacattttattttttgctttatcttttgatttttttttttttgagaggagtctcactgtgtcaccaggctggagtgcagtggcacgatctcagctcactgcaatgcccgcctcccgagttcatgcgattcctctgcctcagcctcccgaatagctgggactacaggcacgtgccaccattcctggctaattttttatattttagtagagacggggtttcaccacgttggccaggattgtctcgatctccttatctcatgatctgtctgccttggcttcccaaagtgttgggattacaggcgtgagccactgcacctggcctaaaaaaattattttaatgaaaaacatttaaaaaaatttgttttgtagagatgtgttctcactttgttgcccaagctggtctcgagttctaggctcgagtgactgtctcccctcagcctcccacgattacaggtgtgagctaccactcccagcctattctagactttttaaaaaatttttttttttattgagacagggtcttgctctgttgcccaggctggagggcagaggtgtgatcacggctcactgcagcctcaaactcctgggctcgagccatcctcctgccacaaacccctgagtagctgggattacagaggtgcaccaccacccccggctaatttttgtatttttgtagagactgaggtcccactatgttgcccaggctggtctcgaactcctggcctcaagcagtcttctggcttctgcctcccaaaatgctgggattacaggtgtgagccactgtgtctgatctattctagactttctttccttctttctttctttcttttttctttcttcctttctttcttttctttctttctctctctctctctttctttcttcttttcttttctttctttttttttttttttaaatcttgctccaggctgggcgtgatggatcacgcctgtaatcccagcactttgggaggccgaggcgggtgtgtcatgaggtcaggagatcgagaccatcctgcctaacatggtgagaccccgtctctactaaaaatacaaaaaattagccgggcgtggtgttgggagcctataatcccagctactcgggaggctgaggcaggagaatggcgtgaacccgggaggcggagcttgcagtgagcagagatcgcgccactgcactccaacctgggtgacagagcgagactccgtctcaaaaacaaacaaacaaacaaaaacaacaacaaaaaaaacttgctccaaacctcagaatgttctagacattttaaagcaaatgcccacatctccttttattcctctttttatgttaatgataacatactgttctgggctttcttttttcccaaactatatcttggggatcactccatgtcagaacacagcttgctcatttcttttaaaacccgtgtagtatttctcttctgttggaatacaatttatttaatcggtttgtctggatggtcgcgtgtcttgtttccagtgttttgcggccagaaagcgccgcgtcacggatgatggataactgcattgacgtcatttcgcgtaaaagttgattgtatcagaaggagaggttcctggaagtgccatagctgggccaggtgtttgcggctggaatatgtcctgtatagggttgtaccaatttccctccccactttcaaggcaaaacagtactagtttccccagagtctcaccaacggtgagtattatcaaatcttttgatcgccaatctgatgggttaaaaacgacatcgcagtataggtgtagtgttcatttcccttatgaaattgagcatcttctcctgtgtctaagaaccgtttgtccgtctttcttaatgagctgtgtgttcatatcctttgctaactttttcacggacccttgaggtatttttcctattgattctttctgagagctctttatatatgacagacattattcctttgtgttatgagtttcaagtatttttttccatttgtcattacaaattattatttattattattattattatttttgagacagagtcttgctgtgtcacccaggctggagtgcaatggcttgatctcagctcactgcaacctccgcctcctgggttcaagagattctcctgcctcagcctcctgagtagctgggattacaggcgcctaccaccacacctggctaatttttgtatttttagtagagacaaggtttcaccatgttggccaggctggtctcgaactcctgaccttgtgatccacccacctcggcctcccaaagtgctgggattataggcgggagccaccgccccgacctatttattatttttaagtggtcatttgtcttttgactttgatgagggtgatttttaccttgcggagtttttgggggtgtttacacaaagtcaactgttgtaatcatttcttttgtggcagctgagatttgtggggctacctttgataagatgggagagagagattgagattaatttattttttatttcaatttttttcagtgcttttcaaaccttatttatttattttttttagacagagtctcactctgttacccagcctggagtgcagtggtgctatttcagttcattgcaacttccacttcccgggttcaagagattcttttgccttagcttcctgggtagctgggactacaggcacctgccaccacacccagctaatttttctttttaatagagatggggtttcgccatgttggccaggctggattcgaactcctgacctcaagcgatccacctgccttgggctcccaaagtgctgggattacaggtgtgagccaccatgcctggccgcttttcaaactttaatgtgctgaggaatcccgtgtggattttgttaaaatgactcagtgggtcttgagtaggatctgagattccccttttattttcttttcttcttttcttttcttttcctttcttcccaggatctttctctgtcacacaagctggagtgcagtggtatgattatagctcaccatagcctccaagtcctgggctcaagcaatcctcccgcctcagcctcttgagtagctgggactacaggtgcacaccatcacatctggctaatatttttattttggtagagataggatctcactatgttgcctaggctggtctccaactcctgggctcaagtgatcctcccacctcagcctccctaagtgctgggattacaggcacgagtcaccatgcctggcctaataaaccttatgttacatgataagagaagggataagacaaaggtattttatatacatgtaaacatattcatagcaagttaaggaagacatattggtgacagctacagtcttcatttctgtaactggtcacgtggttatagctgttatttttaactaactttagaacaattcttggtatcaaagtttgcgttcgtttgttcaggctgtaaagtatcccagactgggtggcttaaacaacagaaatgtatagccttacagttctgggggctggaagtccaagttcaaggtgtcagcagggttgattccttctgaggcctctctccttgtagatgactgtcttctccgtgtcttcacatgtttgtccctctgtgtgtgtctatgtcccaatctattctttctctctctttcttttctttttctttctttctttctttctttcctttctttctctctctcttccttccttcctttctccctgtctctttctttctgtttccttccttcctttcttccttccttctttcctttctctctctctttctgtttccttccttcctttcttccttccttcttttctttctttctctctctccttcctccttccctcccttccttccattccttccctccctccctcttccctttctgtctctctttctttctttctccttccttcctttatcccttctttcatttctttctctctccttcctccctccctccctccctcttttctttctttctttctttctttctttctttcttctttctttctttctttcactttctttcttgatggagtctcattctgtcactctttctttctttcgagatggagtctcattctgtcccccaggctggagtgcagtggcacaatctcggctcactgcaatctccgcctcctgggttcaagtgattctctagcctcagcctccagagtagctgggattacaggcatgtgccacaactcctggctaattttttctatatttttaatagagatggggtttcactatgttggccaggctggtcttgaactcctgacttcaagtgatccgcccatctcagcctctgaaagtgctgggattataggcatgagctatcatgcctggccccaatctcttctgatgtccaatcagtcatactggatgaggctgcaccctgaagacctcattttcacttaattattacttgaaagttctaatctccaaatacagtcccattctcaggtactgggggttgggctttcaacatatgaattttggcgggacatagtgcatcccataactggaagagaaaggcaggcagtgtggctggaggtaaaggggattaggagggatgccaaggagaggtttagagagatcagcagaggattcagggccataggaagaacttggtttatttgcacgaaatgaaaaggcataggctggctgagcatggtggatcatgcctgtaatcccagcactctgggaggccgaagcaggaagattgagcccaggagtttgacaagagcctgggcaacatagtgggacctcatctctacaaaaaaacttaaaaaatagctggttgtggtagtacacacctgtagtcccagctactccagaggctgaggtaagaggattacttaagcccagaagttcaaggttacagtcagctatgactgagtcactgcactctagcctgggtaacagaatgagaccctgtttcagaaaagaaaaaaagaaaagaaaagaaaagaaggaaggaagaaaggaatgagggaaggaaggaagaaaggaatgagggaaggaaggaagaaaggaatgagggaaggaaggaagaaaggaatgagggaaggaaggaaggaaggcaggcaggcaagcgactaggatgttcttagcagggaataacatgttctgtgttttgcaaaagccctatgcatacaaggatcttctgagaaggtgactgggacaccaaggaggaggcgccttcagtcattcagctgatccctgggctgggatcaaaaggatagagagaggtggatggctccaggggcattgagaaggaaaggacttgtgaatcggtgtgcaaaacagatatgaaccagttgaaagttcgtgatggaagaaacatgtctatacaagtgaagtgacgaatctgccttctcaagttaaacccttcaaggaggatccggtgggcagacacatcatttatttttcttttctttgagacaaggtcttgctctgttgcccaggctgcagtgcagtggcacaaacacagctcactgcagcctcgaactcctgggctcaagggagcctcccacctctgccaagtagctgggactaaggcgccaccacgcttggctattttttttttttttgagacagactctcgctctgtcacccaggctggagtgcagtgacgtgatcttggctcactgcaacctccacctcccaggtttaagcaattattgtgcctcagcctcctgagcagctgggattacagacagctgtcaccacgcctggttaatttttgtatttttagtaaagacggggtttcaccacgttggccaggctggtttcgaactcctggcctcaggtgatccatctgcctcagcctcccacagtgctgggattataggcgtgagtcactgcgccctgccgaattttttggatttttagtagagatgaggtctggttgtgtttcccaggctggccttaaactcctgagtgcaagtgatcctcccacctttgccaagtggctgggactaaggtgccaccatgcttggctagtctttttgatttttagtgagatgagatctggctatgctgcccaggctggtcttgaactcctgagctcaagcaatcctctcgccttagcttttcgaagtgctggcattacaggtgtgagccaccatgcctggccccatttcttgtttgctgtggtttccttacattttggagcagtactgggcacatagtgggtgatcaatgaatgtttgtgggatcaatgtatgaatgacttaaatcaaaattgaagaaatcggggacccgggaggctgaggcaagaggaaattggggaactgggaggctgaggtgagaggatcacttgagctcaggagttcaagaccagcctggacaacatggccagatctcatatctactaaaaataaaaaagattagccaagtatggtggcagaccctgggggtgtgtgtgggcatggagggggcggtggtcggggtcttgagttcttggtgctcagggttaggggcggatggcaggtggaggcttacctatcagtcataggaggaggtgagatttctaacaacagctttgaggtagtgagctccccatctctgggactgtgtaaatgggaaaagcacttgtccagagagttgtagaggaaaattctgccccagggaaggtctggagctgagggaacagggaacctcagtctgctctaaatgaggattcattgggtttcccaggagcccaggggtgacagggtttctgcatctccctcacttcctgtggtatctgagactcagcctgtctcacataccttctgtgccttgtggctggagcttggagtgggtctcacttggggtctgggtgtctggcttgctccaggcatcaacgttctgaattccatgcccttgagcttggaggtgctgccccctggtgtggaggagaagaaatgtctcctcaacaccccatgacctcctggtaggggattctgtgcattctataggttgagtctaccttggggagagcccggctgggtcagagcgggtccaaccctgaatatttgtgatctggagatcttggcctgtcagtgggggccccccacccctgagctgaggatctcacactaacccagggtgagcctggagccacagcctactctccaggacacagtgggacagggtgggtggggagtttctcacggctgacttggagggtaggggaggtcgcctcactgctccacagataaatgcatttccactctggaaaattccatccataagcatggttcttgcaggtgagtcagacggagaggaagagagagagagagagagagagagagagagagagagagagaggcaggtagagacagagacacacacgctggtttagggagaaagaaacacatcaagtgaggccaggtgtggtggctcacgcctggaatcccagcactttgggaggcaggggtggatggatcgcttgagcccaggaattggagaccagcctgagcaacatggtgaaaccccatctctactaaaaatacaaaaaattagccagatgtggtggcatgcacctgcagtcccagctattcgggaggctgaggtgggaggatcacctgagctgggggaggctgaggctgcagcgagtcatgatcatgcggctgcactccagatggggtgacagagcgagaccctgtctcaaaaacaaacaaacaaacaaacaaacaaacaaacaaacaaacacagcaactgagcacaaaactcctgaaaagttagcaatgcacagaaagacacagcaggagcctacagatcctgtgagtgatgctccttaaatagtgactggctgaaagaatgaatgaatgagtgaatgaatgatttcttgggctgagcaaaaagaggacttgacacagacatggataacctccagcagctcctgtctactgtgttgataaactgggggttgtgtccagactgctggctggaggtccggatgtccttcaggctgggctagggggcatgaagacagagggtcctacctccagaggggacccaggacgctcgccatcctgagaggctggattccccctcccgaccctggcagggacagggtggggtgggagaggcctcctcgagcatcctcagtgcacaacccagagaaagctcatgggactgagaggaacaggctgagagatggacttttaatggaatggagggagatggggatgcatagcctgggacacatgggccctgggtgcctgtgctggggcgagtgagagagccagtgtccaggtgaagctccttgcctggggcatctgccccatgactgcagtggactgggaagcccttaagagtatcactacccactgatgtccaagtcttgcttgatagtatggtgtccagggaatggtcttggggagtgggttccggagagcctgtgagagttccagggcggggtgcacatcatggggtgcctgggagggtatctttgggagagtctgtggaggagggagttgggaggtgttggaacacagaggagggcctagggtctagtggggtcgttataggatgctcatggggacctgagcatgacatttgggaggctggctctttcctgggaggagctgggggctgaggaagagggtcaggaagtgtcctgtgagagagaacatttgggagtatttcgggcggagacacagtgcaagaaagtggtcttagagcaacaggggtccaccctggggtttcgggggtggatctcagaatgatgtgttttgggaagatggatgggggatgggtgatgggaccacctggtcagtggaggtggggccaggggaggtctgggggaaaaatcctgaggggaggggagagttctgcagggatgatggatgccaggggcatcccatggtgggaccattgtaggagaaacccttgaaagtcagaattcaggtctctgtgatggatctggggggtcagcacttgtggggggcatcctaggggaaaccaatgaagaggtggatttggggtgctgagaaccaggggtatcttgacaagtggaatcttgacaagtggaatttaagagtgtgtttggggggattagaaataaggggaagattatgggggtgcacccaggggttggagcactcacgggaagattctgggaggaggttggagcattccggggtagagactgggttggggggtccctgaggagcatactaaggggggtggcagtttggagggtttggagcccaggggtattttgggatgctatatcaaaagcaatagataatggggtgagattagggagtcagtatttgaggatgtcttgggcacatagtgggtaattaatgaatgtatgtgggatcaatgcatgaatcacttaaactagaaatggaaggaattgggtatgtggcttgggtatgtggcagaccctaggggtgtgtgtgggcatggggtgggtggtcagaggctttcatgttcttcatgtttggggttgggggcaggtgccaggtggaggcttatctatgactcataggaggaggtgatatttctaacaatagccttgaggtagtgaactccccatctctgggagtgtgtaaatgggaagggcacttgtcagaggtggtctggggagggggtgtcccaacccaagggtgcctggggaggggcacagatcacaggaggatgggttgacaggattagaacttagtggtctgttgggagttattcatggggaaggtgggtttagggggtcaggattggggtgtctcagggcatgcatcacaggaggtgagttaggtcagcctgtggggcgaggtgcccaggagtggatggggcaggccctggaggaaggacaggacagagccggctgtagcagaggctttactgcccccacgccctccccagctctgccctggtcagtagcatttgcggtacacgatatagggaccctgttcctcgtactgctcccgcaggacccagcaggactggaaggcgcgcagggaggccaggatggagcccccgatccatacggagaaattcctggtgggctgggcagccaccaccacgtgggtctcggctggcagagcgcgcagcagctctgcccggaagcgaccctcgaagccggtgaagagcgaggacccaccgcagagaagcacgttttgggccaagtccgcgcgcatctccagtgacaacttgcggagactctgcttggccatggtggagaggccgacgggtgacagccccgggacctctggggggttgaacagcagctccggacactggaacagctccttgcccagggtgaccgtgcgcccatcgggcagcttcagagtccgcttgtactcctgctccggccgggcctgctccttctggaagtcggaggccacgtagcaatagtggtgcttaatgttctccactaggtccaggtcctgctgtcccaggggcaggccggcctggagcagcatctccgccaggaaggcggtcaggttgttgcccgccaggtccagacgctccgtggcgtggagcaggttgtagccctggaagacgggcactgtgtaggtgaccccgtgtcccgtgtccaccaccagcccgctgacacgaccgtgggcgtagacagacagcaccgactgcgatgccacgtacatggctggggagcgcagcgactcgaaggccacctccactagcttctcgcggttggtggccgggctgaagggtgggtcggagaacagcagcgggtggtcgtgggtggccactcggaggtcgtgctccagcaggtggcgccagatgagctcggcggcatcccagtccacgacgatgccgctgcgcaggggttgcaccagcgtcagctctgggagcacgcgggctgcctcgccgatgaacgtctgcagcccggactgccccgaggtggcgggtttcttgggctggcagcccaggatggtggccacggtgtaggtggggctggcctgcccagcaaaacctaccttacaggtgcctgtgcccatgtcaataaccaccgcgccggtctttggtggcagcctgtcggccaccatgccgggggagtcccgctgcaggggcttgttcaccacgttgggactggggtttgggccgggcctgggggcctccagggaggactgggattccgaggacttggggcgacttgcatccatggttgcgggacgccaggtgagggggcttttcctctggggttggggttgcggggagaagaggttgaggcccggccagtggggagggcaggcagacagggggaggggtgggcccgcaatctatgacgtcacggtgccccttcagtcttcttaagacatcacaatgcagccaagaggatgggtccctgcccagccctgcctgcccaaaggctgtcatctcttctctgaagagccaaatttggaggaggagatgagcatctcagagcagggccctcttaacacatttctgtcggatgcgctagaagctaatacgatggcacctggtttttgagaaaagacaagctttttgttgcatgtcaacccactgggagctaggaatccagcacaagtctgtttctcagctggctttaaggcagtaattttattagaaaagttctggggccgggggctgtggctcacacctgtaatcccagcactttgggagaccgaggtgggagatcacctgaggtcaggagttcgagaccagcctggccaacatggtgaaacccgtctctaccaaaaaatacaaaaattagcctggcatggtggcgcatgcctgtggtcccagctactggggaggctgaggcaggagaatcacttgaacccaggaggtggaggttgaagtgaaccaagatcatgccaccgcactccaggctgggggatggagtgagactctgtctcaaaagaaaaagaaaataaaagaaaaaaaattagccaggcatggtggcacatgcctgtagtcccagctactagggaggctgaggcaggagaatctcttgaacccgggaggtggaggttgcagcgagccaagatcatgctactgcactccagcctgtatgacagagcgagactcatctcaaaacaaacaaacaaacaaacaaagaaacaaacaaaaaaccctcataagtggaaggcatttcagcaagttgtttcttttttgatctgccattctgcaagctcaaacatttctttggggcatggtttcactaaaaacatgcaaaattggtttctctaactctttgggccacgctttcaggaagacccaggaatcctcctctgggtacctcgccatgaagctatttacagcctagtggcagagagcttgccacaggcctccctagaatattagaatattcctcctcagaatattaattagaaggtggggcgggctagcatggcttcctggtttccaaatggagacagaggccagccttggttggggatggagagaggcagggagagacaggaacacccctgtcctagattctttgcttcctctgctatattcactgcctgaatcattctccctgtcccattcctgccaagaaggaatttgcctcttcaaatctcagtctgatgccacctcctcctggaagccaaccctgatttctactctgtactccaactagatgagggatgggggaagtctgccttctctccaggggttgttacctgcttcctcctggcaggagaggggctcagtgagatacaagaaggggtttcagtatagataaaaggggagagggtgcatttgggaggaaggaattatctcaacaataaatagcaggcttcaaaatgcattaggagagttgcttcaagaccatggctgtttttggtgatatcagatatcacctgttagttaaagcaaataaaaacgtttttcttagtgtatgttcatgcatgtggtggtagaaatcaccaggaatagtgctagtgaatgtcttatgggatatctaaatgaaagaggtttaattttctagttgtgtctagatttattactctgccagagtgtggtttattgagcattttaattaattattgatttactggtatgtgtggtctaatccatgcttttggaaatatttactcagcaatttattgagggtctgttttttggactgttcacaacaaccagaaatacactaagtgataacactttattgttttcaatttttttttgagactgggtcttgctatattgtccaggctggagtgtagtggtgcaatcactgctcactgcagcctccttaacctcgtggtctcaagcaatcctcccacttcagcctccaaagtagctgggactataggcatgtgctactatctccggataagtttttaattttttgtagaaatggggtcttgctatgttgcccaggctgatcttgagctcctgggctcaagtgatcctcctgtcttaacctcccaaagtgctgggatgacagggattagccaccatgcctggcctttcttcattttctgattttaaaacatggcaacttcttatggcaactttatgacttaggaatgggtactatgtctatttttttgatggaaaagaagctcagagaggtcaagtgattgttcaaagtcacaactggtatgagacagaggcaggagttgagcctacatctttgacttacttcagtggctgactgtgagtctgggaaattgtgaaatctaagatccacccaaaacagccaggcatggtggctcacatctgtagtccgagatactagggatgctgaggtgggaggatcacctgagcccaggagttggaggctgcagtgagccaagatcacaccactgcacccagcctgggtgacagagcgagaccctgtctcaaggaacaaacaaacaaacaaacatacaaacaaacaagaaaaacccactaaaaatagaacagaaacaaaggttgggactctgtgagcctccatttcctctcttcttggataaaatgaggataccttgtctggcacttaatagatgctagcttctgagatactgaagcaacaatataggaaaatatcgtgattataggcaacaaagccatgatgtgcctaaggccacagatccggggccaggcttctggaatttaagccctgactcctctgcttaatagctgaggcaaactactaactgtgactcagtatccccatttgcaaaatgggagtaataatagtgccaccttcaaagtgcagctatgaggatgggcaagttattgttttctagtgtttaggtcagtggttcacacatagtaagtgctatgtgagggtttgttacatcaatgataagtactggctggacgcggtggctcacgcctgtaatcccagcactttgggaggctgtggtgggtggatcacctggaggtcaggagttggagatcagtctgaccaacatggagaaaccccgtctctactaaaaacacaaaaattagctgggcgtggtggcacatgcctgtaatcccggctactcgggaggctgaggcaggataattgcttgaacccgggaggcggaggttgcagtgagctgagatcgcgccactgcactccagcctgggcgacagagcgagattctgtctcaaaaaaaaaaaaacaaaaaaccaaaaaaacttcctaggtcagcctgctgtgcctttagtgccgagaaccactgatttcttgagcagtcttgtcacaaaccctggagaacaaaaaggaatgctgtattcatcgtctttttattctgtcctttctaggcaaaagaaatgctgtattcaccgtctttttattctgttctttcgaggctggggcattttggagccttgctgagcctgcagagactgctcctcctgactacccaacgcttagagatagtcaataatttgtttgcaacttcaggtttcctgtgcaaacaaacaaatccagagcccatactccccagccacctccttgtcaggctcttgcactccagcccactctcctcttgccccagtcaccccagataaccaggaacagctcccacaccccagagcctactgaaatgattcatattagccaattctaagcctgctcaccctgccttgcctgttccttcctggggaaaccacaataaaatctcttgcccacagtttctctcactccctttgcttcctgaccacccatggtgctttccccatgtcccgcccccgccacccaccccccacgcactgcccccggccctatggcatggtgtgcctcctcctcttagaaactgtagtaagttatctttcaattgcaatcatctcccaatctcttggccttgccatatgtgcataataataaaacctacatttaattttttttttttaagacagagtctctcccgtcacccaggctggagtgcagtggcatgatctcggctcactgcaacttctgcatcctggattcaagcaattctcatgcctcagcctcccaagtagctgagattacaggcacccgccaccatgcccagctaattatcatatttttggtagagataggatttctccatgttggccaggctggtctcgaactcctgacctcaggtgatctgcccacctcagcccccaaagtgctgggattacagacacacgccaccacgcccagcctaagttttgtatttttagtagagacagggtttctccatgttggccaggctggtctcgaactcctggcctcaagtgatccacctgccttggcctcctaaagtgctgggattacaggcatgagccaccgcaccccgccaaaacctacatttaaaacagaaggcttcactcattcttcttacttgaaatgctcagggatgtttaattatccaacacttcttggatgttcttggcaaacctccttccttcattcctgcagttaattaaaaccgaacctaacagttttttcatgctctcctggggccaattttagatatagagcacgtgactcccactgcaattaatttttttctctgcagttgaaacgggaggctggaagaggatttgaatgtaacgcctttatcccttgacagtagctcaatactgcttgagtgaagatggtgttagtgggttaagcacttggaaacagttcttatctcagacaggcaaccaaaagcccccgtcctttatgccttccagctactgttttgtctaggtttacaaaagtgattttaggccgggcgcagtggctcatgcctgtaatcccagcattttgggaggctgaggcaggcagatcatttgaggtcaggagttcgagaccagcctgaccaacatggtgaaacccccgtctctactaaaaatacaaaaaaattagctggatgtggtggtgcctgcctgtagtcccagctactccagaggttgaggcaggagaatggcttgaacccgggaggtgaaggttgcagtgagctgagatcgtgccagtgcactacagcctgggcaacagagtgagactctgtctcgaataaaacacacacacacacacaaaacaaacaacaaaaaaagcgattttatcctggtgttccctgaaagggctaaatatgcaaagtgggccccgaatgctgaaagacctgagaaccaaagaatgaggcagacaaatccagtctgtaggtaaagattgtttgattgggggaaattacagacagaagtgtggtcttgcgcggctgcaagacaggtaggtctctgcactgttactcctcagacccaaggcttatataccatagggaaagactatatttgctcaagcaagacaaagaaaggcagccctccaaaaaaggcaggagaactacatgcatcataacttataatttgtgctatagtgacatcaaagttgacatgttcttacactaaggacagtattaaataaagttctgatgggtgtctctcactgagtatgctcatgggtatgccttggtgggctcagaacaaggtcaggaaagacatgtgacttttacttttgtgcaaaaaaacaggatacgtaggactgtgcaatgctggaggctgtcttcccagcctacggatcaaatacctgggaatttcactgtatcactctttttttctttttttttgtttttgagatagagtctcactctgtcacccaggctggagtgcagtggcaccatcttggttcactgcaatgtctgcctcccgggttcaagcgatgatcatgcctcagcctcccgagtaactggattacaggcacctgccagcacgcctggctaatttttgtatttttagtagagaacgggtttcatcatgttgaccaggctggtctcgaactcctgacctcaggtgatccgcgcccagccttcatagtatctctcaatcttaagtccacagcagtgtgtattttggggaaaggcagggattcagacgtgatacagacagttccaccctcatgtgtgtgtcctcccatcacctgtgttcaggtgttattggtatcagcagtgagttttggatagttgtgttggtgagagactgaatctgtttcctccccaaagcagcattctcggttggtgtgtggaagttgcagataccaggtgtggagacaaaagtgattccatctcggatgataatctgctgggttgacttctgattagcctcagttccatgaatgcctcctgctccctaccttatttatttatttattttgagaaggaatcttgctcttgtcactcaggctggagtgcaatggcacaatcctggctcactgcaacctccgcctcccgggttcaagcgattctcctgcctcagccaccagagcagctgggattacaggcgcccgccaccacatctggctaatttttgtatttttagtagagatggggtttcgccatgttggccaggctggtctcaaactcctggcctcaagtgatccacctgcctcggcttcccaaagtgttgggattacaggcatgagtcaccgtgccctgcctctactttatttaatactgtctttagtgtaagaacatgtcaaccttgatgtcactatagcacaaattataagctatgactcatgtagttctcttgccttttttggagggctgcctttttttgtcttgcttgagcagatataccctttctctatggtatataagccttgggcctggggagtaacagtgcagagatctacctgtcttgtggcctcccaagaccatgcttctgtctgtaatttcccccaatcaaacaatctttacctacagactggatttgtctgcctcattctttggttctcaggtctttcagcatttggggtccactttgcatatttagccctttcagggaacaccaggataaaatcacttttgttagacacagaaaaaatagggcccggaagacaccaaggaggagggcttgtggttgcatgtctgagataagaactgtttccaagaatttctaaaaaccccacaagaaatttcttcctgttcttcacacatcacctgcattgcagacttgcatgttttacacgtgtgcttatgtttctatgacaagatttatcaccaggcattctttaggagtgcagtaattcagagaaggtgctcttggaaggacgtttgcccggtaatagcatctccactaacgaactgatgacaactctggctttgagcctctggaaccaatgaactctgtttccaagcagtttacaagaacttctccctttttgcctataagacctttcctttacccttccctcactggatgcactcatgctttgccatttggtgaatcctggattagaatcttcttttcctgctcctgaataaattcaacatatttggagatagttttcatgcatatatatgtatagacataaccttggtatatatatgtatagacataaccttggtatatatatgtatagatataaccttggtatatatatgtatagatataaccttggtatatatgtatagatataaccttattatctatacatatatctgaaaactctatataaaataaattatatgtgagaaactatatataactgtatatattatattatatattatatataatgtatatagttctgtatatattgtatatataatatatgtagttctatatataatatataatatgtattataacatatataatatgtattataacatatattatgtattataacatatattatatattataacatatataatatacaatatataatatatgttataatatataatatatgttataatatattatatataatatatacagaactttatatattatatacaatatataatataatatacacagttatatatagcttctcacatatataaccatgtaactatatattatatataatgtattatataatgtaattatgtaatgtacattataatatatagtacatatataatgtaactatataataattatatataatatatagttgcatggttatgtatgtgagaaactatatatatgtgagaaactatatataatgtatattatatattatatatgatataataattttatataatataatataattttatattatataatatataagatatataataatatatataattatataatatataatacatataattatataatatatttttatattatataatatataatacatataatatataatatattttatattatatattatataatatatataatatattatataatatataatatatataatatattatataatatattatataatatatttttatattatataatatataatataatatataacatatataatatataatatataacatataacatatataatatataatatatagttctaaatatagttgtatataatatataatataatatatagttctaaatataattacatattatatataatatatagtataatatatacagttatatatagtttctcacatatagtttgttttatatagagttttcatatatatagataataaggttatatctatacatacataacaaggttatatctatacatatatatacatgaaaactatctccaaatatgttgaatatagttatatatagtttgtcacatatatatgagaaactatacattatgtataaatatatagctgtaaatatatcatatatgttatgtaatattatatatattattatatattatgttcttatatatgtacatataatatgatatatacagttacatataatatatatgagaaactatattacattatatataatatatagttacatggttatttatatagtttctcatatatagtttacttttatatatagttttcatatacatgtttagatataaccatttatagtttcttatataaactatgtatatatataaggttatatctatacatacatatatatatgcaaaaagtatctccaaatatgttgaatttgttcaggaatggaaaaagaggattataatccagcatgtctatttatatatcttatatctgtatatgagaaactatatatatatgtatatgagaaaaataatatatatttatgtacatgaaacatgatatatatttgaaatatgatacatgatatatattttttattattatacttcaagttctagggtacatgtgcacaacgtgcaggtttgttacatgtgtatacatgtgccatgttggtgtggtgcacccattaactcgtcatttataccaggtatatctgccagtgctatccctctccccttcccccaccccatgacaggccctggtgtgtggtgctccccaccctgtgtccaagtgttctcattgttcagttcccacctatgagtgagaacatgacgtgtttggttttctgtccttgagatagtttgctcagaatgatggttgccagcttcatccatgtccctacgaaggacatgaactcatcctttcttatggctgcatagtattccatggtgtatatgtgccacattttcttaatccagtctatcattgatggacatttgggttggtaccaagtctttgctattgtgaatagtgccgcaataaacatacgtgtgcatgtgtctttacagcagcatgatttataatcctttgggtatatacccagcaatgggatggctgggtcaaatggtatttctagttctagatccttgaggaatcgccacactgacttccacaatgattgaactagtttacagtcccaccaacagtgtaaaagcgttcctatttctccacatcctctccagaccctgttgtttcctgactttttaatgatcgccgttctaactggtgtgtgagatggtatctcattgtggttttgatttgcatttctctgatggccagtgatgatgagcattttttcatgtgtctgttggctgcataaatgtattcttttgagaagtgtctgctcatatcctttgcccactttttgatggggttgtttgtttttttcttgtaaattcgtttaagttctttgtagcttctggatattagccctttgtcagatgggtacattgcaaaaattttctcccattctgtaggttgcctgttcactctgatggtagtttcttttgctgtgcagaagctgtttagtttaattagatcccatttctcaattttggcttttgttgccattgcttttggtgttttagtcatgaagtccttgcccatgcctatgtcctgaatggtattgcttaggttttcttctagggtttttatggttttagttgtgacatttaagtctttactccatcttgaattaatttttgtgtaaggaagggatccagtttcagctttctacatatggctagccagtttatatatatatatcactttaatataaataatatattttatatacatgaaatattatatatatttgatatatgatacatgatatatatttgatatgagattatttacatatatgagaaatgatatatatttatatttaatgtataagcttatgtgtttatatttatataacaatacaaatatatagtataaatatgtattgaatatattcttaaatatagtcttatttctcatacatatgagaaactctatctatctatctatctatctataaggttatatatatatataaagttgcaaagtgttaaagaacagagcatggggatccattcttggttaggtcatcgtcatggagaaataactgaatcaccttgaccattagccttcttttgacctcttctttcactagagtgttaggatttgggcattgttaggttattcggagccctggtttgaattcctaaatcccagaattgtgtttcccactaagcaggggttggaccatctgtatacggagccattaaccacacacaacagccagggatggtgagagagccccagctttcctcactctgttgaaggaagcatgtcttggagttgttcatctcttctgcacttttgcttctctttccatgacttgatatctgcctttaataggttcctgcgctttcaggttaaatgcccattccttggacttaacccaaggatatattggctgctttggcctgatgctcagcactgccaggtatgaacagcaccgtgggtgacattggaaagcagcagaggctttctcagccctgagataaacttcagttctgacctgctcgggaaaaggctatgagatgcagcgaaagagaaacatcttcctcaaaagataagctgaagttggccaggtgccgtggctcacgcctgtaatcccagcactttgggaggctaaggcgggcagatcacctgaggtcaggagtttgagactagcctggccaacatggggaaaccccgtctgtactaaaaatacaaaaataagcctggcgtgatgacgcatgcccatagtcccagctactcaggaggctgaggcaggagaatcgctcgaacctgggaggtggaggttgcagtgagctgagatcacgccactgcactccagcctgggagacagagcgagactccgactcaaaaaaaaaaaaaaaagataagctgaagtcaaaaccacagtgagatgagttgccaccttatcctcattaggatgtctactgtaaaaaactcccccaaaccaaaaaaaaccacaagtgttggcaaagatgcggagaaatggaaacccttgtgcatgttggtggaaatagaaaatggtgcaaatatgatggaaaacgtatggtggtttctcaaaaatttaaaaattgaattaccatatgatccagcaattttacttctgggcatatacccaaaagaattggaagtaggatcttaaggagatgtttgtatacctatgttcataacagcgttattcacagtagccaaaatgtggaagaaacccaaaagtccattgatagataaaaggataaacaggcggggcacagtggctcacgcctgtaatcccagcactttgagaggccaaggcgggcagatcacctgaggtcaggagttcgagaccagcctggccaacatggtgaaactcagtctgtactaaaaatacaaaaattagctgggcatggtggtgggcgcctgtaatcccagctacttgggaggctgaggcaggagaatggcttgaacccaggagatggggattgcagtgagccaagattggccgttgcactccagcctgggtgacagagtgagactttctcaaaaaaaaaaaaaaaaaaaaaaggataaagaaatgtgctatacttatacagtgaaatattattcagccttaaaaaggaaggaaattctgctcatgcaaagccatgaataaatcttgaggacatcatgcaaagtgaaataagccagtcacaaaaagtcaaatactgtaggattccacttatacgaggtatctacagtggtcaaactcatagaaacagaaggttgaatagcaggtgccagaggctggagttgcggaggtgaatagggagttatttaacaggtacagagtttcagttttgcaagatggaaaagttccagagatttgtggctcaacaacataagtatagttaacattactgaactgtacatttacaggtggttatgatggtaaattttatgtttgtgtactttactatttgaaaaacaatctgggaaagaagaaaatgttaacaggccagaggcaaggtagaagtggattgcttacaagcctcacagataatgacagtagcagggtacggtggtgtgcacctgtagtcccagctactcaggaagctaaagttgaaggacagcttgattccagcaatttgaatccagactgggcaacatagcaagaccccatctctaaaaaaagatagtaataatatcaaacactgttacagcctcaatgttcccagttactttctaagtgggttacaactgttagcccatttaatctttattctcacattacaggggaggaaaaccaggcacagaggtattaagcagcttgcctggaatctaatagcttatgaagagtagaatcaaattttcaacccaagaagtctgcttccaagtcttcattcttgccaagtatgctacacttccagatacacacaattgcaacataaaccaagttgaacattaatggattctttaaacaaggtcaggtgaatctgtcaggaagagtgtcaggtgggagaaaccaggatggtcttcgctgagaaggtggcattgcaggtagtctttgatggctggccccattttgaaaggtgctggcaatggtggggtgggcgagtggtagaagaagaaggtgtgaaggaagagaaaggaactttattgtgtgtcggtgatattcaaggcccttgaggctgttatttctgcaaatatttatgctttggtgacacaatgggggtgtccaagataaaagacctatagttttcttaaagtatctttttctggttgtagtgtcagggtaattctggctttgtaaaatgagtttggaagtgttcactcctctccattttgtttttttaaataagagtttgagaaggactgacattaattcttctgtacatttgtttggtagaattcatcaataaagccatttggtcctgggcttttctttccttttttttgagatggagtctcgctctgtcgccctggctggagtgcagtggcgtgatcttggctcactgcaagctccgcctcctgggttcatgccattctcctgcctcagcctcctgagtagctgggactacaggcgcctgccaccatgcccggctaattttttttgtatttttggtagagacggggtttcaccgttttagccaggatagtctcgatctcttgactttgtgatccacccgcctcggcctcccaaagtgctgggattacaggcgtgagccaccgggcccggccaggtcctgggcttttcttggttataaggtttttggttactgattcaatatccttactagtcatatatctattcagattttctgcatcttcatgattcagtcttggcaggtcatgcatttctagaaatgtatcaatttcttctaggttatctaatttgttgttatataattgttcatagtagtctcttatgacactttttatttctgtgacctcagttgtaatgtctcttctttcatttctgattttatttatttgcatcttctatcttttttcttaggtagtctagccaaagatttgccagttttgtccatcttttcaaaaaacaacttttagtttcattaatttttctattgtttttctgttttatttatttctttttttttttttttttttgagacagagtctcactttgtcacacaggctggagtacagtggcacaaccttgcctcactgcaacctccgcctcctgggttcaaaccattcttctgcctcagcctcccgagcaactggcattacaggtgcctgccaccacgcctggctaatttttgtatttttagtagagacggggtttttccatggtggtcaggctggtcttgaactcctgacctcaggtgatctgcctgcctcgacctcccaaagtgctgggattacaggcgtcagccaccatgctcttccaaatttttttttttaaaaccctgggccgcacaacatgaggatgaactgagagcggcggccgtgcctccagccatctctggctgcgtatctaatttatttctgctccaatctccgttatttcctttcttctgctaacttttggcttgtttttctttttctagttctagttccttgaggcttaaagttaggtcatttatttgagattttccctcatttttaatgtagtaatttatcactctaaacttccctcttcgtctgcttttgtcgtatcccataaattttagtattttgtgttttcattttcattgtctcaagatattttctattttcccttttgatttattcttttttgagatggagtttcgctcttgtcgcccaggctggagtgcagtggcatgatctcggctcactgcaacctccctctcctgggttcaagcgattcttatgccccatcctcccaagtagttgggactacaggcacctgccaccacacccagctaacttttttttgtatttagtagagacgtggtttcaccatgttggtcaggctggtctcgaactcctgacctcaggtgatccacccacctcagcctcccaaagtgctgggattacaggcgtgagccacctcactgggccctttttgatttattctttgacccattggttgttcgaaggcatattgtttaacttccacatatttgtgaaatgttcagttttctttctgctactgacttctagtttcattgcattgagattgcaaaggatacttgacaacgatttccaccttcttaaatgtgttacgttgtgttttgtgagataacgtgtgatctatgctggagaacgtctcacatgtacctaagaagaacgtgtatcctgctattgttggagagaatgttctgtatatgtctgttaggtccatttgctctttagtatcgttcaagtgctttgtttccatattgatcttttgtctgaatgttctatccattattgaagatggaatgctgaaattccctactcttattgtgttgctttctatttatcttttcagttctgtcaatgtttgcttcatatatttgggtggtctggtgctgagtgtgtatatatttatacgtattatatcttcttggatgagatgatgcttttatcattatacaatgtccttgatttttgatttaaagtctattttgtctgatgcaagtatggctatctttgctgtgttttggttaccgtttgcatggaatattttttttctatcctttcattttcagcctattgtgtttctttaaagctaaagtgggtctcttgtagacagcaatacttgagtcttaaaaaatatgctcagctactgtatgtcttttggttgaagagtttaatccatttacatttaaagtaactattgatagggaaggactagggcaattttgttcattgttttctgtcttgtagtttttcatctcttttcctctcttgctatctttctttgtatttcattgatttttttttatggtgacatgttttgattttttttctcattttcttttgtgtatctactataagtattttctttgtggctaaaatgaaactcctataaatatatttataacaatctattttaaactgataacttcaatcacatataaaaactctacacttttactccccctagattttgttattgatgttaaaaattcagtcttttctatattgcatattcattaatatatttttgaagttatagtttttaaaaatatttttgtcttaaaacttctatgccagaatgaatagtgatttaaacactactattgtagcattttcacctgatggactctttcagcatttcttgtaaggcagaactagtggtaatgaactccctcagcttttgattatatagaaaagtctttattcagttatgaagggtagctttgccagatataagattcttggttggcattttttcttttaatcctttgactatatcatcttactcccttctgggctgcaagatttctgcagagaaatcctctaatagttttatgcaggttcccttgtatgaaatgagttgcctttctctcactgctttcaaaaatctcttggtctttagcttttgataatttgattatgtgtcttggtgtggatttctttgggtttatcctagttgaagtctattaggctacttggatctggatgtccatttcctgtctcaggtttggaaggtttttagccattatttctttaaagaaactatctgctatttttctctcttttttctaataatctcatgatgtgtatattgttcggcttgacagtgtcacataagtcccttaaggtttcttcactctctttcatttttttttctttttgttcctctgattggatatgttcaaatgacctgattatttcttctgcttgatcaaatctactattgaacccctctattgaattttttagttcagttactatattctttagcaccataaatactatttggttgaaaactgtttaaatctctttattgatattttaattttgttcatgcatcattttcttgagctcatagaacacctttatgatggttattttgaactctttttcaggtaatttacctcaattatttagaatccgtttctggagatttagtttcctttttggggaaccatctttcctttttttaattttatcttattattattacacttttaagttttagggtacatgtgcacaatgtgcaggtttgttacatatgtatacatgtgtcatgttggtgtgctgcacccattaactcgtcatttagcattaggtatatctcctaatgctatccctccccactccccccaccccacaacagtccccaaagtgtgatgttccccttcctgtgtccatgtgttctcattgttcaattcccacctatgggtgagaacatgcggtgtttggttttttgtccttgctatagtttgctgagaatgatggtttccagtttcatccatgtccctacaaaggacaggaactcttcatttttggtggctgcacagtattccacgctgtatatgtgccacattttcttaatccagtctatcgttgttggacatttgggttggttccaagtctttgctattgtgaatagtgccgcaataaacatacatgtgcatgtgtctttatagcagcatgatttataatccttcgggtatatacccagtaatgggatggctgggtcaaatggtatttctagttctagatccctgaggaatcgccacactgacttccacaatggttgaactagtttacagtcccaccaacagtgtaaaagtgttcctatttctccacatcctcttcagcacctgttgtttcctgactttttaatgatcgccattctaactggcgtgagatggtatctcattgtggtttttatttgcatttctctgatggccagcgacgatgagcattttttcatgtgttttttggctgcataaatgtcttcttttgagaagtgtctgctcatatcctttgcccactttttgatggggttgtttgtttttttcttgtaaatttgtttgagttcattgtagattctggatattagccctttgtcagatgagtaggttgtgaaaattttctcccattttgtaggttgcctgttcactctgatggtagtttcttttgctgtgcagaagctctttagtttaattagatcccatttctcaattttggcttttgttgccattgcttttggtgttttagacatgaagtccttgcccatgcctatgtcctgaatgttatcaagctacctgacttcaaactatactacaaggctacagtaaccaaaacagcatggtactggtaccaaaacagagatatagatcaatggaacagaacagagccctcagaaataatgccgcatatctacaaccatctgatctttgacaaacctgacaaaaacaagcaacggggaaaggattccctatttaataaatggtgctgggaaaactggctagccatatgtagaaagctgaaactggatcccttccttacaccttatacaaaaattaattcaaggtggattaaagacttacatgttagacctaaaaccataaaaaccctagaagaaaacctaggcatctttccttttttatttgtgtttcctgacaccatgcatttgagaaaactatgtcttatagtctttacaggctggcttcttacagacagagcgagaacttcaccaatcaatctgactgtctgtagtctgggggcctttcaagccctttctgtggatgcgtcttctctagatgtgtgtgtgtgtaaattctcaatgaaaggtcacaaagatcatacattgtatgatgctgtttgcatgaaatatccagaataggtaaatttatacttagagaaatcagactgatggttgccagaggctgagagggaaggaacggggagtgaatgcttaatggatacagaggtttctttggtgataaaaatgttttcatttttatctagaagctagatagagttgatgattgtacaacatagtgaatgtactaaatgccactgaattatacactttaaaatagctaatttttatgttacgcatatttccttattattaatttatttattttgagatggagtctcactctgtcgcccaggctggagtgcagtggtgcaatcttggctcactgcaacctccgcctcctgggttcaagcgattctcctgcctcagcctcccaagtagctgggattacaggcacccaccatcatgccaggctaatttttgtatttttgtagagaaggggtttcaccatgttggccaggctggtcttgaactcctgacctcaggtgatttgcctgccttggcctcccaaagtgctgggattacaggtgtgagccaccatgcccagcctgtgaatttcatctgaataaaataatgtgtgcgtttatacgtatataaagagataaaacaatgggcaaaagattaacaattgttggagggtatatgggtgttcattcaactcttcttttagtctaaaatattttaagtaaaagttagaaaaacggagagaatacttggtgtttaattttttagccatttccatcattttcagtttatctcttctgaaggcaaaaagtgatagcttataaattgtataatgtcagcataaaagatgaaattaagtcaattctaaaaaaaaaaacaactaaaagtgagtaattttaaaaatataggtatctttctggttaagtttttccagtagaatgccaaatctctcggtgttaatgcacaaagtttataaaatgtgtgtttctttgaatataatgttctctggcctatggttttatgggaaacgtttatatttacatctaaataaatacaagattgttttttgagagagagtctcactctgtcacctgggctggaggcagcaatcatagctcactgcaatcttaaactcctgggctcaagcaatctttgcctcccaataaatacaagattttacgtaaaatgacatgaagaaaaagtgtcccaagtgataacaaaagagagtgtgtgtctcagatattgctggtcctaagacatgttatcataatgtcacactcagtgtgaagcattctttttttttttgagttggagtctccctctgtcacccagcctggagcgcagtggcgtgatcttagctcactgcaacttttttgtcccaagttcaagcgattctcctgtctcagcctcccgagtagctgggattacaggtgcacaccaccacacccagctaatttttgtatttttagtagagacagggtttcaccatgttggccaggctggtctcgaacttttgacttcaaatgatccaccctgccttggcctcccaaagtgctgggattgcaggggtgagccaccactcctggcccagtgtgaagcattctatactgttgtgctcttgtcctgagtttatttccccaaggctttctatattttggcaaaagcaaaggttaatgttctgcaatgagtttcccaaaagctgagagagtgaaagaaaatcttggaaaaggaagccatgaagagaaatatgacctcatatcaaactaaccatttcatttttttggttaacaggaagcagtattttaaatatttcatatcctaacatgacagtttgttactgattactgatacacaagccttttactagtttcagctatattccaggaaattatttgagacttttgggttgaggtacaatacagccttttcacatttgaaataatggaatatagagtcccagtggacaattttgtgagcatctgcttttcagaaacgtataattgacattaagcaggagttacctctatcaagacaatgaatgtggatggcacacagcaatggcaaaaaatggagctggaattcagaggattaatattaatcctttattactaataataatttattaatatttgaggcacatgtcgagagtattaacatgttttctctgtcatgttttctcttcccttgttctttataatgacatggtgtagtcaaaaacaattttcatggtttgttctatatatttctataccctttcatccatcatcaattcatcctccacccctccatcccttcactcattcctctacctatccatccatccatccatcatccatccctctaaccatttatctatccatccatccatccatccatccatccatccatttatccatccatccatccatccatccatccatccatccatccatttatccatccatccatccatccatccatccatccatccatccatttatccatccatccatccatccatccatccatccatccatccatccattcatttatccatccatccatccatccatccatccatttatccatccatccatccatccatccatccatccatccatccatccatccattcatttatccatccatccatccatccatccatccatccatccatccatccatcattggtgccagtcaatttgtgctaggtgttgagcatccaaatcccactgctcatttctccatatcttgatttctttttctaaactcctgtctgtttcagcccttcctatttagtaaacattaatgtgtccatgtcccttggtcaccagttatacaaaaatgaataattgcaggctcttgccattgaggaactcatggtctatggcagtgccactcaaattgtggtccatgaactgttactgacccttgtgaagaaattaatcttggactaaagcaattctttaacctcagcctcccaagtatctgggaatatgggactacaggtgtgtgccaccatgcccagctaatctttaaaaaatgtttttgtagaggcagggtctctctatgatctatctgtctctggaccattgctttgcctgagtcttggaagcccctcaaggatggaactcagtggaagaaatgtcctgaccagggaatctgcctcttggctgtgccaccaccatcactgccccagtatttaatgcagaaaaaaatctcctggacatcagatttcctttggaacatgagggtccctttgtagtaatggattccctcatctcctttctcttcttagatccaagcaaaaggacttgggtatctgccatatccaattatctgcatcagtgttgcccattttccccatggttaattgagagatgagtaaatgtttttccacaatcctccagggacaatccaagtatcatgggctctaggctcccactgaaactatttttttttcctaacagaaagggagacccagaggggttctgatgcaaaagctgtccctggagcctcgatccccagacaaggatgtctatctttgcatagaccaaggtggcactgattaaacccaagatgctggagcctggggaggtttttttcaggagctgtcttgcaatgaagggagttgacatgctcatggggcattgagagggatccatcactctgtctgcacacagaccttggtgactgggggtgagagtttggaacccagccttgtggagatcttgggggtctgggcataatttagagactagtattagtggcaagatgggcccccagaactgctggtattgtgtttcacaagctcattgggttgagcttgtacaggtatttggatggaaagatgaatttttgtctacctcttggacatttgccaacctgcacgctggatgcatcttaccttgtctgttattgctgctgtgaatccaagcaggctggacctctagatagcagaaggtcacccatgttgacgttcattccaaaccttccataaaatgtgctggaagcagcaaggggtgggcacctcaccttggccatggggccgggactagaacaacccatctggcatgggctggaagcaccttcagctcactttctggagactgtgaccatcctacaacagtgatgctctggaggaattctcagctcagaattccagggaagatgagttgagtgttaagtccaagaaagagacagtgtccagaatagagacagctcaggatctgaaatcaaactgggttcaaatcccagtctaccctcttcttagctgtgtgactttaggtaagtcacttaccctctctgagtccatttgtctttaactttagttccaacaatcattatttcccttgcaggacgtattcatttaacaactatttactgagcaggctctgctgtggatccttgagatgtgagaatgtgagaaataaataaataatataagtgaattaaattattttattaagtaaattatattatatattaaattaaataatataagtgaatataatataagagaatgtgagaatttaataaataatataagtgacagtttgtcctgcaaactgtcatgtgatcatttggctactaaagtgaccaagagtccagatcatgcctggtcataacggactgatgtgagttttattggcaacaagaagataaataatgtagctcctttcttctggtcactcagtgtcagcaaagggaccactctagacccacattttggcatccctgaggaaaacgggaaagggacaggtaaaaccacaactttaaaacttttcaaagggactctcctcccacccaaagaaggactgatttaggaatcactgtgagatgttccagcccagattagagtaagtcatggctactttttccagctctgcctgtctgactgtggggcagcaggtgagagaggttggatgggtggaacatttttttctgaaagagatttcagtgggaaacagtgtgccaaaagctcaggacataatcccagcactttgtgaggccaagatggggaggtattatttaaaactgggattaagggaccagcctgggaaacatagcaagaccgcatctctacaaaaaaattaaaaaataaaaattagtcaggtgtggtggtgcacacctggagtcccagctactcgggaggctgaggcaagaagatggcttgagcccaggagttgaaggctgcagtgagctatgattgtgctactgtactccagcctgggtgacagagtgaggctctgttccctctaccaaaaaaagctcaggacacaaaggcattacaatggaattagaggaactgctagagatccccaaaaccaggggtttttatttttttcagatgcatcaaagacagtgggaccacctgggcaccctgaaaggaaaggtgagtttgggggcacacaggagtgttgcctgggtttctgcctgcaatcatgttttatgtcttactcttgggtggattctgttatccaccagtccatacagtccggatgctctattacttctgcctggaataaacttccctcctctagctctctggaaaccttccctcctctacctgaccttcaaaacttccatgcctccttctctgtgaagccttccctgatcccatcccaggcagagtttcatcccctgggtacccaaatcatcatgcatgtatttttattacattgctcatcagactatgctgaaatgagttgcacaatgttcatgttctctctcaaactctaaattctataactgcagggctaaattatctgactcccgtacatctttggttgactctggaaaatgccaccaatgaggcactccatttcatttttggttggattttacacatacagtgcgtgtgtgtgtgtgtgtgtcaccagataagggtctgtgaaaacagaagaagaattacagaaaccagtggtggggcgatgacactgttctagacccaaatgtcaacctgtgtggtttcttcccaagagtgctctgcagtttcaaggcaggtcctgcagagttgttggtgcagaagccttccccaccatcccaaagggccacaatgcctgaaaccaggggaaatgccagtcctagaacagttctagggtggaccattggccctgagggttggcaagtgtggcttctctaccagaccagggtgggacatgatcacccattagccagaaatcataacttagtggtgaaggggagtctgtttgtgtgtgtgtgtgtgtgtgtgtgtgtgtgtgtgtgtgtgtgtatgtgtgtgtgtgtgtgtgaagcaaatcttgaatatctattacagtgtttggagatgtgtgaaatgccgatgcaagaacaaggactttggaattaaatctcattttgttagaatcttgacttggttaccttcttgctggttcatcctggacaaggcactgcacttctcagatctctgtcttctcatccccaaaattcatagaggtattaatacctatggtcatttttttttaattgagagagggtctcactctgtgttctgttgcccaggctggagtgcagtggtgtgatcacagctcactgcagcttccacctcctgggctcaagtgagcctcccaccttagcctcccaagtagccgggactataagcatgtgccaccatgcctggctaatttttctatttcttgtagagtcgggatcttgccatgttgctcaggctagtcccaaactcctgggctggtcccagcctcccaaagtgctgagattacagatgtgaaacaccacacccagcctaatagtgtggttattgttattgtcattgtcatcaagggcttgctgaatatttctataacagcttccccagccacctccattcccaccatcctcacttctcttcccaaaaacttagatttgcatttcattctttcattttttccattttcggggctcaggggttgatgaaagacagatgctcgaccaccttcaattatccaccgacagacttctcttcattactgagaatggggtacaaaaagtgtgtccttgggtaggaggtgataggcttagaggagctgcccagctctcagaaagctctccttgcttccaaaacacagctggaggagtgggtgtgaaaactattgcctgggcttctgcctgcaagcctattttatgtcttactcctgggtgcattttcttaaccaccagtccatagagtccagatactgtattatttctgtctggaacaaccttccctcttctagctctctggaaaattcctacctgaccttcaaaactcagctccaatgcctccttctctgtgaaggcttcccagatcccatcccaggcagagtttcatctcctgggtaccaaaaatcatcatgcatgtatttttattaaattgctcatcagactatgctgaaatgagttcaacaatgctcatgttccctgtcaaactctaactctaaattctataactgcagggctaaattgtctaactcccatacatctttgtttttcttttaattttttttgtgttggagtctcgctctgttgtccaggccggaatacagtggaatgatctcggctcactgcaacctctgcctcctgggtttaagcaattctcctgcctcagccttctgagtagctgggattacaggtgcccgccaccacacctggctaatttttgtattttttgtagagacagggtttcaccttgttggctgggctggtcttgaactcccatcctcaaatgatctgcccgcctcagcctcccaaagcattgggattacaggcgtgagccactacgcccagccaaactcccatacatctttgattgactctggaaaaatgctaccaatgaggcactccattccatttttggttagatttcactgttagaaagttctttgctaggttgaaccacacagctgccctcattaacatccaccttccagtagtataaagcaggcaattctactcttcccctcatgaaggtcatcagatagcaaggtcagtgtattagtctattcttgcattgctttaaagaactatctgagatgattgggtaatttataaagaaaatatgtttcactggcgatggttctgtaggctgtacaggacgtataatgacttctgcttctggggaggtctcagggaacttacaatcatggtggaagatgagggagaagcagatgtcttacatggcaggagtagaggcagagggaggtgctacacacttttttttggtgggtggaggagacggagtctcactctgtgcccaggctggaatgcagtggcacggtctcggctcactgcagcctccgcctcctgggttcaagtgattctcctgcctcagcctcccgagtagctgggattacagtcacctgccaccacacctggctaattttttgtatttttagtagagacagggtttcaccgtgttgaccaggctggttgcaaactcctgacctcgtgatcggcccgccttggcctcccaaagtgctgggactacagttgtgagccatcatgcctggctggtgctacacacttttaatgaccagatctcgcaagaactcactcactatcatgaccaagggggatggtactaaaccattcatgagaagccacctccatgatccaatcacctcccagcaggccccacctccaacattaaggattacaattcaacatgagatgtgggtggggacacaggtccaaaccataccaggcagctctcacctgtctcaagaggcttccctgaccacgtcttgtagtgtccttagctattacctacagggcatcctgaccacttcacccctgcacttccccctatcacaaaggtcttgtgcatttatcttcttgttggtcattggtctcctgatggagatggtggagtccagagaaccggggatcttgcctggatgattcacctctgaatgttttatgcccattctagggcatgacacattttgttgaatgcatggatgaatggtagagaggagcttggatggaatgagaaaaatcaggatggcgtataactaaagacagccttgcaggccatcatctgagtgaggaataattccacaggcagcctcatgacaaagagctccagggaggccttcagtagaatctacttgctcttaaatgatcagtcttgctgcttttttctttttttttaaatttaaccccatgcactcttttatttatttatctttttcttaaaattccattttccttttgaaacagggtctcgctcagtctcccaggctgaagtacaatggggtgatcatgcagcctcagcctgctgggctcaagcaatcctcttgcctcagtctcccaagtacctgggatgacaggcttgtatcaccccgcccagctaacttttgtaatttttttgtagagatggaggcaccctatgttgcccaggctggtctcaaactcctgggtgcaagcgatcttcccactgcagcctcccaaagtgctgggattacagacgtgagtcagtgcagccggcctccattgcactcttagtaatgccatgaagcagccactttgggcagctttttgtgttgtctgagagacactcttcctcagcccctggtcacctctgttgaaaactcttcctggctgtctggcatgctgggaatcagctctatttgttttgccctgaagatgtgttttattcataactcactctgactccttagaaaacaattcaataaaaactcagacgagttaatgggtgcagcacaccaacatggcgcatgtatacatatgtaacaaacctgcacgttgtgcacatgtaccctaaaacttaaagtataataataataataaaaaaaaacaactcagttgaggacgggcacagtggctcacgcctgtaatcccagcactttgggaggccaaggcgagctgatcacttgaggtcaggagtttgagaccagcctggccaacatggtgaaaccctgtctctactaaaaatacaaaaattagctgattgtgatggcatgtgcctgtaatccaagctacttgggaggctgaggcaggagaattgcttgaaccggggaggcggaagttgcagtgagccaggatcacgccactgtactcccgcctgggtcacagagcaagactctgtctcaaccaaaacaaaaccaaaccaaacaaaaagaaaacacctcaattgggttgagcagggatgaggatgctatcttccactcaccttgagcaggaatgagaaatagaatcttattttataaaacatacgaataataaaacagccctggtcatatagcccaaagtggataaatactggcgtaaagcaaaagtgctagctcagaccatttctctgagagaaccactcctgtcctctttgctttttcttttcctttttagcatgcttcttaaccatccacagttgggaaagaacattcaccaggtcctgcattttccattgctggagttgtgggcactgcatggtctttcagaataatctggctttgtctgggagcttggaggttgccgaagagaggaagtattcctgatttaagtgtgcagctcttcctggttcttggccatccttcttgttcacctcattcactcaggcaatacttagggacataaaatcttctagagctagtgtctcatagtagtccttgaaattgagtcagactacccacaggccgctgctctcccatccaatgcagtgaagccaccagtaatagctgagctcagcagcaactgcccctccccaggccattcaaccccctcctgctgtcattgtgcctctatggtttcctttctttagatttataccctaaatgtttttcttctgttaaatacgtttgggggtacatatgcaaggtgtgttacatggatatattgcatgatgctgatttgggtttcaattgaaactgtcacccaaattgcgaacatagtacccaataggtagttttttttttatggtgaaaagatatacatatatttagaattagccagctggactcagtttagatgatcccaattttgttggcaacatccaaagcatcataatcaggagccagtcgaacatatgccttcttctcttcatcaggctgaatcagggtgttgaccttggccacatccatgtcatagagctacttcacatgctgtttgatctggtgcttgttggcttcaatgtccacaatgaacgaaagtgtgtcattgtcttctatcttcttgatggtggactcagtggtcagcggcaacgtgatgattgcagagtggccaagcttgtttctcctgggggtgctctttcgaggatatttgggctgcctccggagtcacagtgtcttgggctgctggaaggtgggtgacatgtgggatcttttttttagtggctgtggacacctttcaacactgccttcttggcctttaaagccttcactttggcttcggctttaggaggggcaggagcttccttatttgctttcggcgccatcttgtgaaaagggcccaataggtagttttttaacccttgcttccctctgaagtccccagtgtctgctgttcccctatttatattcctgcgtacccagtgattagcttccactgataagtgagaacatgtggtatttggttttgtttctgccttaattcacttaggataatgggctccagttgcgtccatgtcactgcaatgaacaggtttttttttttttttctaagacaaggtcttgctcggtggcccaggctggagtgcagtgatgtgatcatagctcactgcagcctcgacctcccaggctcaagtgatcctcctgccgtagcctccccagtagctgagactacaggcagtcaccaccaagtcgaactttaaattttttgtagagatggtttttttttttttgacggagttttgctcttgttgcccaggccagagtgcaatggtgcgatctcggctcactgcaacctccgcctcctgggttcaagcgattcttctgcctcagcctcccgaatagatgggattacaggcatatgccaccacgctcagctaattttgtatttttagtagagatggggtttctccatgttggtcaggctggtctcgaactcctgacctcaggtgatccacccgcctcggcctctcaaagtgctgggattatagccatgagccaccatccccgggctccaagatggggtcttgtcatgtcacccaggctggtcttgaactcctgggctgaagtgatcctcctgtcttggcttcttaaggtgctaggattacaggcatgagccactgtgcccagccaattgtattcttttttatggctgcatagcaatccatggtgtctatatactacatttaaaaaaatccagtccaccactgataggcaccccggttgattcaatttctttgttattgtgaatagtgctgtgataaacatgctcatttggtagaatgatttattttccttgggcattccctcaatttgattccagtgctggctcatcacagatttctctttgcttcagattctcatccacgcatttagacccaagcaagcccttctctctgttttcttacttagcttgttgcttcagtttcatcatcccgtttcacctcccagcccttttggtatctgacctcagctttggttaaggacccctgggatgaggggtattgaagcattccaccatctatgtggctgtctttaacttgaaccgcatttttttttttgagatggagtctcgctctgttgcccaggctggagtgcagtggcatgatctcggctcactgcaacctccaccacccgggttcaagcaattctcctgtgtcagcctcctaagtagctgggattacaggcgagtgccaccacacccagctgatttttgtacttttagtagagacgaggtttcaccatattggtcaggctggtctcgaactcctgacctcgtgatccacctgtctcggcctcccaaagtgctgggattacaggcgtgaggcaccacgtccagccgaacctcaaatttttcactatagggagcagtgggtagctcttcattggagtgtggccaagcgtctcattcagagatgccagctgcttctttcccatcccatgccttggatagacactaactgattaagttttctccctccagcctactgattctagctgcagcctcattactcttctcaagacaccatcccaggaagccactaccaatcaatgatgattggcatgtgagatgaaaattatttgccaccccatgcaggcttcttgccatagttcagctgttcttcctgcagctaaagtgcattgtgtaaaacatgggggatgtgaatcagtcggtggcctcagacttcattctggtgggcctcttcagtcactcaggatcacgccagctcctcttctccctggtggctgtcatgtttgtcataggccttctgggcaacaccgttcttctcttcttgatccgtgtggactcccggctccacacacccatgtacttcctgctcagccagctctccctgtttgacattggctgtcccatggtcaccatccccaagatggcatcagactttctgcggggagaaggtgccacctcctatggaggtggtgcagctcaaatattcttcctcacactgatgggtgtggctgagggcgtcctgttggtcctcatgtcttatgaccgttatgttgctgtgtgccagcccctgcagtatcctgtacttatgagacgccaggtatgtctgctgatgatgggctcctcctgggtggtaggtgtgctcaacgcctccatccagacctccatcaccctgcattttccctactgtgcctcccgtattgtggatcacttcttctgtgaggtgccagccctactgaagctctcctgtgcagatacctgtgcctacgagatggcgctgtccacctcaggggtgctgatcctaatgctccctctttccctcatcgccacctcctacggccacgtgttgcaggctgttctaagcatgcgctcagaggaggccagacacaaggctgtcaccacctgctcctcgcacatcacggtagtggggctcttttatggtgccgccgtgttcatgtacatggtgccttgcgcctaccacagtccacagcaggataacgtggtttccctcttctatagccttgtcacccctacactcaacccccttatctacagtctgaggaatccggaggtgtggatggctttggtcaaagtgcttagcagagctggactcaggcaaatgtgctgactacatagaaactgctggtgagattccagcggtcctcgatcccacccaccttcccaaagtatgcatttggcattcaattgccaatttgtgcaactggccaaatatccagccattgcccaaggtgcaactttttgagaaaatgtctgccttttaaattgaggtagaatacacgtaacataaaatgagccactttgaagtgtaaaattcagctgctaagtgcttatgtccaaggctaagtgtctgcccagttcctccctgctcacgccgagttcctccctgctgatgactagctgggttcatgttttccctcatggacttgtggaaagcaatggtaatcatcccaatcacattcagcatattttttttctctctcttttttttctttttgtaacggggtctcactctgtcgcccaggctggaatgctgtgacatggtcatagctcaccgcagactagaactcctaggctcaaggggtcctcctgcctcagcctcttgagtatctgggactacaggcatgtgccaccacgcccagctaattttgttcattttttgtagagatggggtctcatgatgttgcccaggctcgtattgaattcctggactcaagcaatcctcccatctcggcctcccaaagtgctgggattacagatgtgagccattgtgctcagacagtatattatttctgtaacaatgtacccccccccccattttttttgagatggagtctcattctgtcatctaggctggagtgcagtggtacagtctcggctcactgcaacttccacctcccgggttcaagcaatcttcccacctcaacctctcaagtagctgggattacaagcgtgcgccaccatgcctaactaatttttgtatttttagtatggatggggtttcaccatgttgaccaggctggcctcaaactcctgacttcaagtaatctgcccttcttggcctcccaaagtcctgggattacaggtgtgagccaccacatctggccagaaatatcaatatattataaagctaatatttaaacattataaagctaacaaaactctgaagaagtgtcagcaccaaagctggccctgagaagaaaacagaaaataaatcaggtgtaacttagatattttattaaaatatgtatatttacagtgtctactgggtgataagtaaaatatacaaattaattaaaaatatacaaggagctccagtaactcagtaggacaaaatcttttttttttttttttttttttttttttgagacagagtctcattctgttgcccaggctggagtgcagtggctcgatctcggctcacctccacctccacctcccaggttcaagcaattcttctacctcagcctcctgagtagctgggattacaggtgcctgccaccacccctggctaatttgtgtatttttagtagagacggagttacaccatgttggccaggatggtctcgaactcctgacctcatgtgatccgcccacctgggcctcccagagtgctgggattacaggtgtgagccaccacaaatcctcaccctgaagccccacaaattcactccatctcctcacctttcattcaaggtcacagacttgttatctacttcctgtgagacctgctcccaatctgtcctaactcccagctgttcttgttctcaccccgtctacctgtggtggtgtggtggctcatgactatagtcccagcactttgggaggccgagatgggcatatcacttgaggtcaagagttcgagaccagcctggccaacatggcgaaaccccatctctgctaaaaatacaaaagttagctgggtgtggtagcgggcacctgtaatcccagctactcaggaggctgaggcagaagaattgcttgagcccaggaggcggaggttgtagtgagccaagatggcaccactgcactccagcctgggcgacagagtgagaccctgtcttaaaataaaaaaagttataaacatggaatcaccacacaacccaaccattccgctccttggtgtatacccaaaagaagtgtgcttaaacaaattcttgctcatgcatgctcacagcggcctacctctacagccaaaggtggaaaaaacccaaacgtccactaatggaggaatgcataaacagaatcaatataatggaatgttacttggtcataaaaaggaatgaaagactggctgtggtagcttgcacctgtaatcccagcactttgggaggccaaagtaagaggattacttgaggccaggagcttgaaaccagcctgctcaacatagtgaaactccatctctacaaaaagtaaaaaaaaaaaaaaaaagtccaggctgtggtggcacgcacctgtagtcttagctgcttgggagactaaggcaggagaatcacttgagcctggaagcagaggttgcagtgagccaagatcacaccactgcattccagcctgggtgatagagtgagaccctgtcttgcaaaaaaaaaaaaaaaaaaaaaaaaaaaaaagaaaagaaaagcaaaaaagatatctgctaccatgtatataaaccttgaaaatattataataaatgaaagaagcctgacacagtagatagcatgtggtataaattcatttatataaagtatctagaatagttaaatcaatagaaagagaaagcagattgatgatggccggtcgtagtggctcatgcctgtaatcccagcactttgggaggctgaggtgggcggatcacctgaggtcaggggtttgagaccagcctggccaacatggtgaaaccttgtctctcctaaaaataaaaaaatacaaaaattagccgggcgtggtggtgcatgcctgtactcccagctactcaggaatctcaagagaatcaactgaaccgggaggtggaggttaaagtgagtcgagattgcgccattgcactccagcctgggtgacagagccagactctgtcttaaaaaaaaaaaaaagaaagaaagcagattgatggctacatgatcttagaggtgggtgcagaggggaattggggttgattacttaatgggtaagagtctgattttgggtggcaaaaatgacttggaactagagagaggggacagctggggcatcacttcatgaatgtaccagatgctgctgatttgttcactttaaaataattagtgttttattatgtcaattccacctcaataccaaaaattattctcaagtttgatattaggaaaagaaaacttagagcaaaagcaataacacaaagcagtaaatcgatggaggaacatttgtttttagaaccatttctgtcctgaaaacctagtgtgtgataaagatagaatttcaaaacatctcgacaatgatgatttaataagagtcctgtggacaatagattacacatgtgtaaaagaattttgctcgactaacttttgaatttaggaaaactcctcaatatgttagaaatattaatatatcatcaagctaatatttaaacattataaagctaacaaaactctgaggaagcaagaagaaaacaaactaaatcatgggcaacttagatatttgatcaaaatatgcacatttacagggtctatcaggtgataagtaaaatatagaaattaatttaaaatacagaaggagctcaaaaaactcaatagaacacaatctttttttttttttttttttcctgagacagagtctgttgcccagtctggagtgcagtggaacaatctcggctcaccccaacctccacctcccaggttcaagcaattctcctgcgtcagcctcccgagtagctggccctacaggcacctgctaccatgcccggctaatttgtgtatttttagtagagataggatttcaccatattggccaggctggtttcaaatgcctgacctcaggtaatcttcccacctcagcccctcaaagtgctggcattacaggtgtgagacaccgtccttggcccaataggacaaaaatctaataattaataatttgattttgaaaatgggcaaaagacatgaatagattttttttttcaagacagagtctcactctgtcacccagactggagtgcaatggcacgatctcagctcactgcaacctccgcctcccaggttcaagcgattctcctgcctcagcttcccaagtagctgggattacaggcaccagccaccacgcccagctaatttttgtacttttagtagacaaagggtttcatcatgttggccaggctggtctcaaacttctgatctcaggtgatccacccaccttggcctcccaaagtgctgggattacaggcatgagccaccgcgcccggcctctgaatagacgtttttcaaaagaagatatacaaatggcaaacaggcttatgagaaggtactcaacatcactgatcatcagagaaatgcaagtcaaaactgtgaggagatatcatcttaccccagttagcttacatccaaaagacagacaataatacatgctggtaaggatgtggagaaaaaggaacgcttgtacagtgttggttaattcaatcactatggagagcagcaagggccacacagtgagaccctctctcttaaaaaaaattacaaaaacaggcctggtatagtggctcacacctgtaattccagcactttgggaggcctaggcaggcagatcgcctgagctcaggagttcaaaatgagcctgggcaacttggcgaatccgattctctaataaaaatacaaaaattagctgggtgtggtggagcacgcctgtaatcccagttacttgggtggctgaggcacgagaatcgcttgaggctgggatgcagaggttgcagagagtcaagattttaccactgcactccagcctgtgcgccagagtgagactgtgtcaaaaaaaaatggtgaatagaagaataattgaataactgcctcagacatttatacagttctcatctcattctgggcacacggaagatcatgttggcctcatctccttgattttaaaaacagtattctaaaatcaaggagactagatgtatcacttctaggccaaatcatgaaggaaaatgtgtaagagtttcatgtgctcttcatctctgtgatcagaattgaagaaggcatgagtttgagatgctgcatcaccaagatcgtggtgattccattatcattacccttgtaacttgtgagcatccttactgccagcaatcattattagatatcaaatttgagataggagttcatatttactgtatgaatatcttggtctgggagtggtggctcatgcctgtaatcccagtgctttgggaggcagaggaaggaggctcacttgagcccaagagtttgagaccacccaggacaacacagggagaccccatctctacaaaaaatgtaaaaatcagccaagtgtggtggtaggtgcctgcagtcccagcaatttgggaggctgatgtgggaggatcccttgagcctgggatgtcaaggctgcagagagccgagatcatgccactgaacttcagcctgggcaacagagcaagactctctctcaaatacaaaacgctttttcctttaggcttaaattctaaccctcaaacctccaatgtgaaggtattaggaggtggggcccttgggagatgatgaggttgtgaaagtggaaccctcgtaaatgggattagtgcccttctgaaagtggcagaagagagctcgccaacaccttccatgtgaggagacagggaagatatgacagtctccaacctggaagagggtcctcaccagaccctgatcatgctggcaccctcatcttggaattccagcctccagaacagtgataaacaaatgtctgttcttaaaaaaaaaaaactgtggaaagcaatgttaatgttcccaatcacttttggtacattctttccttaactatgtcttaatgcatagttgtgttggatggcctactttgtaatgttagaatatgcatgttagtgaattaacaaatacagcagtaaagaatgctcttcgggttgggaatggtggctcacgcctgtaatcccagcacattggaaggccaaggtaggcagataacctgaagtcgagagttcgagatctgcctgatcaagagaaatccgactctactaaaaatacaaatcagcctgtcacagtgtcgcatgcctttaatcccagctactggggaggctgaggcaggagaatcacttgaacctaggaggcagaggttgtggtgagccaagatcacaccattgcactccagcctgggcaacaaaagccaaactctatctcaaaaaagaaaaaaaaaaaaaaaaagaaatgctgtttgttgaccatttgaatggctagtcttggtgcttcctggtgggtgaggagagccctgccccattcctacccattcaagtagacatggcataagagtgattctcactttctcctatagcctccttatccattggctgaaaagattgttttttaacgtgtcttataaatgcttccatagcaaaaaaaatgaattgacttttatagtgactctttcggggattgttacccataattccgtaatttgtttgaactcctaaaaaagggaagtatgccgagcacaatggagatttcgtctcaaaaataaataaataaataaataaataaataaataaataaataaatagaaaagaaagaaaaggaagtaaagggaaatatacaaatatacaaggtgttatgagagagttgctaattgtgattccctcttaattgtccaaagagaccacctctggggatctattcctaaaagactcgttagaagtgcagactcgctctctccctctccctctccctctcccgtctccccacagtctccctctccctctctttccatggtctccctctgatgccgagccgaagctggactgtactgctgccatctcggctcactgcaacctccctgcctgattctcctgcctcagcctgcggagtgcctgggactgcaggagcgcgctgccacgcctgactggttttcgtatttttttggtggaaatggggttttgctgtgttggccgggctggtctccagctcctaaccgcgagtgatccgccagcctcgcctcccgaggtgcccggattgcagacggagtcttgttcactcagtgctcaatggcgcccaggctggagtgcagtggtgtgatctcagcttgctacaacctccacctcccagctgccagccttggcctcccaaagtgccgagattgcagcctctgcctggccgccaccccgtctggaaagtgaggagcgtctctgcctggccgcccatcgtctgggatgtgaggagcccctctgcccggccgtccagtctggaaagtgaggagcgtctctgcccggccgccatcccatctaggaagtgaggagcgtctctgccaggccgcccatcgtctgagatgtggggagcgcctctgccccgccgccccgtctgggatgtgaggagcgcctctgcccggctgccctgtctgagaagtgaggagcccctctgcctggcagccgccccgtctgagaagggaggagcccctccacccggcagccaccccgtctgggaagtgaggagcatctccgcctggcagccgccccgtccgggagggaggtgggggcgtcagccccccgcccggccagccgccccatccgggagggaggtgggggggtcagccccccgcccggccagccgccccgtccgggaggtgaggggcgcctctgcccggccgcccctactgggaagtgaggagcccctctgcccggccagccgccccgtccaggagggaggtgggggggtcagccccacgcccggccagccgccccgtcagggagggaggtggggggtcagcccaccgcccggccagccgtcccgtccgggagggaggtgggggggtcagcccccgcccggccagccaccccatccgggaggtgaggggcgcctctacccggccagccgccccgtctgggaggtgtacccaacagctcattgagaacgggccatgatgacaatggcggttttgtggaatagaaaagggggaaaggtggggaaaagattgagaaaccggatggttgctgtgtctgtgtagaaagaagtagacttgggagacttttcattttgttctgtactaagaaaaattattctgccttgggatcctgttgatctatgaccttacccccaaccctgtgctctctgaaacatgtgctgtgtccactcagggttaaatggattaagggcggtgcaagatgtgctttgttaaacagatgcttgaaggcaacatgctccttaagagtcatcaccactccctaatctcaagtacccagggaaacaaacactgcggaaggctgcagggtcctctgcctaggaaaactagagacctttgttcacttgtgtatctgctgaccttacctccactattgtcctatgaccctgccaaatccccctctgcgagaaacacccaagaatgatcaataaaaataaaaataaaaaaataaaaaaaagaagggcagactcatgcatttaagaatcactcagggaaatctgaagatgacctgtggtgggggtataaatggattcttaaatgtgtcttgtgattatgtgagagtgtgactgtgtgactgtgtgtgtgtgtgtgtgtgctgtcatctgtggagtgggggatcctcttttgccttgagaaagctcatctctgtccacttactctgggctctaccatctgtgccttgtatccagtagaaataaaacagtttgcggcagaaatggagttttattttattttacttttttattaggattatttgtagaccgggtctcactctgtcgctcaggctggagtgcaatggcacgatctcagatcactgcaacctgtgcctcctgcactgaagccatcctcccacctcagcctctggagtggggagatcccacacctgtgtaatttttgcattttttctagagatggggtttcctcatgctgcccgggctggtttccaacgcctgggctcaagtgatccacccgcctcagcctcccaaagtgctgggattacaggtgggagctactgtgcccggccagagatggagatttttgttcttcttttgatgagacggaacctcgcaccgtggcccaggctggagtgcagtggagtgacctcggctcactgcaagctctgcctcctggggtcatgccattctcctgcctcagcctcccaaagagctgggactacaggcgcccgacaccacgcccagctaaggtttttgcatttattattttttttttttgtagggacgggctttcaccgtgttagccaggacggtctcgatctcctgccctcgtgatgcacccgcctgagcctcccgaagtgctcggattacaggcatgagccaccatgcacggcccagaaatggagatttttgagcaaacacattaaagaaaagaaacgcaaatagacgaaactcattttaacatttttatttaacccaaggaatacagatataatcaacaccaatacaattgatgtcacaatgatgactaagatacatgctacaatccttcattctcagatgcaaaatctagtatgtgttttacagcaaacgtcagttggaaactgaacgtcgatcacacatgcttgatgtgcatgtcaatttcatgagagttacaatctcaggagaagtctcacatagcgtaagagtccaaacataccttcaagtgttttgacaagttcttcactactcattcttagaactgaatttaccaacaacaatcccagcctattcattgctgaactgcatcccattgaaagaatgggtcacagttcctctctctagacactgtggaacgacattgaaggcccttccatcttttggcgattgtgaggacaggtgctagaagcctctgccctcagccttgtccacgtgagttctaattcctttagaacaactatctcagggtgggaaagatggttccaatgctaagtgcctattgcattgattatgaatcaatgaaactctttctccctgggggttgtcccagttggattccaagcagcactgtcagagtgttccagcttctccacatgctccgcagcccttgggatggtgagtgattgtcacggtggcttctgggagagcttcttggttgttgttgaaggtgtatttgacgtgcatttccccaggggagggacagtgaacgctttttgaagtggttctttacatcccctttgaggaaatgtctgctcaagtctctggctgggttttgaacagaatcatttgtttgtcccattggagttttgacaactctgtgtattctgagtatgagcagtccttgcacgtatatgagatttgcaaatattttgtgccccaatctcaaggttgctctttgatacaaatcaagagcatctgaggcagagcaaaggttcaggtgagaggacggagcatttctccacctctccagcatgcgcagcatctctctcctccgagatgccgagacatgtgtgcagggagacaccatgaaaaagcaggtgtgcttcattctgaatagagcgtctctgattcccgtctggtgcctgagggtgcatggcccatgagccttagaagagacgtcttcgggccttgcacgttggcctccatagaaacttgtggcaaattctgggctccggactgggtgatggaggtagaggtctgagggcagaggtgggcaggggctccaggccatggagatccaagtggaattcttcaggcagagcctgtctccagggactaggcttgggcatttgggatgagccctgggggacggccgctctgtagtcaggtttgaggtagaggacacgccaggaagaagggctgactccatgcacaaggtttgctgggggtcccatcaggggcaggaagccttggggagcctcaccctcttctactgaaggcgccacacacacattctctgctctctgggctctcacagatccattttcaatgtcaatctcccagacagtctctgtactagtgagcaggagccagcgggcatgggcagggtacaagagatccttcagggacatcaagagttgctcagggaccaccaggagctgcacattgaggaggctgagtcgcagggctccctgtgggtccagccccaggaactcctgccccaggcgcaggtgcaggaccattcctggttccaagaccgcgatgatcatcttcctctggggaagctgtgggccctgggggagaaaagccgtgggtcagtcattgtcctctgagggtggctcaaacagggagagagcaaggcggggagctgccagtaacttccccaggcataaatgaaaccccgcagggacacccagaattggcacctgtattgacgccccttgggacggtgatttcctgcaagtcccctagggcctggagctcaggcagacctgtctcacccacgcccacctaggtggtgtgaccttacctggggcagctccaggggcagctgtgcagggtggtggggagctggctgtaccggagctggttctgcacctgtggagagagcagagtgtgcaggtgaaagcccttgtcatgcaggatgcccttgagggttcaaggtgcctccgtgagaaagaccaaatacagaagaagccaggtacaggacacccagccacggagctgcaggaggaagctcccgacactctggacagcacagctgctcgcctcatgacgtgacgggacactggcttggtagcaggggactcaggatgaaaaagagaagatgcctcacctggatgaggacccagctcctccactttctggcgttttggggcatttgatggcgtgccgctggagctgtaggacagagagacacagtcagatttcgggcagttccctaacgtccaattccctgaatccccacaaattcactccacttccctgcctttcattcaaggccacagactcgtcatccacttcctgtgagacctgctcccaatctgtcctaactcccagctgttcttgttctcaccccatctacctgagcttccctgggtgaagaaaaggcagggaaggagggtcggtgcccacagggagcagtttaccctttcaggagctcatgcagatgagagttggaaaactctccttgggtgtgaggagctggagaaagatgttgagatcccggagaggtggcacctctgtctacacaggtaacaaaggaatggggtcttaggattcgaatcacagcaggagaagaggaaggaatttgtcgggcatgacggcatgcgcctgtaatcccagcactttgggaggccaaggtcggaggattgcttgagtccaggagtttgagagcagcctgggcaacatggtgaaagctagtctccactaaaaatactaaacattagtgggtcatggtggtgcatgcctgtggtctcacctactcaggaggctcaggtgggaggatcacctgcgactcagaggtggagcccgcagtcagctaaaatcacgccactgcactccagtgtggaccatcggagtgagacgctgtctcaataaaataaatcagtaaataagacaaatagaaaaattaaaaatgaaaaaaggaggaaactgttttatttttcctagtagatcttgaaactctcacatcatgtcctacaatctcccttcttgcagaacacagaacccattccctgtggagctggttgggtggattgaaagtggggctgccctgagatatgtgtgtggttgcgatgtagaagccttcccagcaccctgtgatgacttacgggcacctcacttccctctggccccaaattcaaaacatccaatctcatggcaggttcatgcacccttttcccttcccctctctccaacacacacccacacatcccacaggcaggtcaccccgcaggcgtccccagcacatagcaaagctcacccgctctctcctgcgtggtcgctcttggattcggtgcaggaatcactggggcttcttgggcgccgggaacctttcatggtgaaaatttccagggttctccaagtcagccactgccagtgtttgtctgtctcctgcaaagatttcttcttggctcccgaatcctttagttcctttgagagagtggtgtcagccccaaagctgctcccgaaggcttgggttgtgtagcgacggggctgtggccagcggcaggtggatgaggctctgacaactgagctcttgggggaatcttgtacactgtcagcagggggtggagccaggggatttgtcagcaggaactgatgtgattggctgttcctggtatgacaacgggaggggccctcatggaggattggggcgtaactcaatcgatagatgaccgatcaacagaacctgcctaaccccatcaagagccaacctgtttcctgtcccctcccatcctctaggtcttgcctaataatgatagacactttctgtcatacccaattcatccatcgctgaaatagtttttcatgtgtgccttttatattttcatgcaaaaaaaatatgttaattttcacgggggctatcctggggaatgctatgtacatgaaatgaagtgtcaaaggagcagaagcagaaggaaattcacaagcttctctgagcgtctctgcttgaattcctgccatgtttcctaaacatgttggcttctttcttcctacccaagtaagaaggtgcttcagaagatcaatcttagggcatttgacaaacgctgctgagaatttcaggatgacacgaaggaacctttgattggatttgtggatgtgcctgtgaaagcgtgtgtgtgtgtgtgtgtgtgtgtgtgtgtgtgtgtgtgtgaagccaggatgaagtggctgttcctggggtggagacccttctttctcttgagaatgttcattgctgttgactcattgtgggttttggagatattttctctctttctttcgttctttcagacattttttgctttctccctccctcgatcctaaccaccctccatcccccccctcactccctccctcccgctttccatccttcctccctcccttccctctttccttccttcctgccttcttccattccccttcccctcttccttctgtccttccttcctgtgtgtaaaagaaaaattggtgaatagaagaataattgaataactgcctgagtcacttatacatttctcatctcactctggggacacagaagaccgtgttgtactcatctcctcgattttaaaaacagtcattctaaaatcaaggattctagatgtatcacttctaggcgaaatcttgaaagaaaatgtgtaagagtttcatgtgctcttcatctctatgatcacaattgaagaaggcaggaggttgagatgctgcatcgccaagatcgtggtgattccattatcattacccttgtaacttgtgagcatccttactgccagcaatcattattagatatggaatctgatataggagttcatatttactgtatgaatatcttggtgtgggagtgttggctcatgcctgtaatcccagtgctttgggaggcagaggcgggaggccgaggcaggaggctcgcttgaacccaggagttcgagacaagccggaagagcatggcgagaccctcgtctctacaaaaatgtaaaaatcagccaagtgtgctggtaggtgcctgtagtctcagctccttaggaggctgaagtgttaggatcgctttcgcccgggatgtaatggctacagggagtcgagatcttgccactgaacttcagcctgggcaacagagcaagactctctctcaaaaataaaatgctttttcctttaggcttaaattctaacactcaaacctccaaagcggaggtattaggaggtggggcccttgggagatgatgagattatgaaagtggaaccctcgtaaatgggattagtgcccttctgaaagtgacggaagagagctcgccagcaccttccatgtggggagacagggaggatatgacagtctccaacctggaagagggtcctcaccagaccccgatcatgctggcactctcatcgtggacttccggcctccagaactctgatcaacaaatgtgtgttcttaaagaaaagaaaagtgtggaaagcaatgttaatgttcccaatcactttgagtacattctttccttaactatgtcttaatgcatagttgtgttggatggcctagtttgtaatgttagaatatgcatgttagtgaattaataaatacagcagtaaagaatagagttgtggttgggaatggtgtctcacgcctgtaatcccagcacaatggcatgccgaggcgggtcaatcacctgtagtcgggaggtggagatcaccctgaccaacatggagaattcccgactctactaaaaatacaaatcagcctgtcatagaggcacatgcctttaatcccagctactcgggaggctgaggcaggagaatcacttgaacctaggaggcagaggttgcggtgagccgagatcgcgccattgcactccagcctgggcaacaaaagctaaattctatatcaaaaaattaaaaaaaaaaaaagaaggctgtttgttgaccatttgagtggccagtcctggtgcttcctggtgggcgaggagagccctaccccattcctacccattccagtagtcatggcataagagtgattctcgctttctgctatagcctccttatccattggctgaaatgattgttttttaatgtgtcttataaatgcttccatagcaaaaaaatttgaattgacttttatagggactctttcggggattgttacccatcattccataatttgtttgtactcctagaaaagggaagtatgccgagcacagtggatatttcgtctcaaataataaataaataaccaaatagaaaagaaagaaaaggaagtaaagggaaatatacaaatatacaaggtgttaggagagagttgctaatcgtgattcccccttaattgtccaaacagaccacctctggggatctattcgtaaaagactcgttagaagtgcagactcatgcatttgagaatcactcagggaaatctgaagatgacctgtggtgggggtgtaaatggatacttaaatgtgtcttgtgattgtgtgagagtgtgactgtgtgtttgtgtgtgtgctgtcatctgtggagtgggggatcctcttttgccttgagaaagctcatctctgtccacttactctgggctctaccatctgtgccttgtatccagtagaaataaaacagtttgcggcagaaatggagttttattttattttactttactttttattaggattatttgtagaccgggtctcactctgtcactcaggcgggagtgcaacggcacgatctcagatcactgcaacctgtgcctcctgcactgaagccatcctcccacctcagcctctggagtggggagatcccacacctgtgtaatttttgcattttttctagagatggggtttcctcatgctgcccgggctggtttccaacgcccgggctcaagtgatccacccgcctcagcctcccaaagtgctgggattacaggtgggagctactgtgcccggccagaaatggagatttttgttcttcttttgatgagacggaacctcgcaccgtggcccaggctggagtgcagtggagtgacctcggctcactgcaagctctgcctcctggggtcatgccattctcctgcctcagcctcccaaagagctgggactacaggcgcccgacaccacgcccagctaaggtttttgcattttttttttttttttttgtagggacgggctttcaccgtgttagccaggacggtctcgatctcctgccctcgtgatgcacccgcctgagcctcccgaagtgctcggattacaggcatgagccaccatgcacggcccagaaatggagatttttgagcaaacacattaaagaaaagaaacgcaaatagacgaaactcattttaacatttttatttaacccaaggaatacagatataatcaacaccaatacaattgatgtcacagtgatgactaagatacatgctacaatccttcattctcagatgcaaaatctagtatgtgttttacagcaaacgtcagttggaaactgaacgtcgatcacacatgcttgatgtgcatgtcaatttcatgagagttacaatctcaggagaagtctcacatagcgtaagagtccaaacataccttcaagtgtttcgacaagttcttcactactcattcttagaactgaatttaccaacaacaatcccagcctattcattgctgaactgcatcccattgaaagaatgggtcacagttcctctctctagacactgtggaacgacattgaaggcccctccatcttttggcgattgtgaggacaggtgctagaagcctctgccctcagccttgtccacgtgagttctaattcctttagaacaactatctcagggtgggaaagatggttccaatgctaagtgcctattgcattgattatgaatcaatgaaactctttctccctgggggttgtcccagttggattccaagcagcactgtcagagtgttccagcttctccacatgctccgcagcccttgggatggtgagtgattgtcacggtggcttctgggagagcttcttggttgttgttgaaggtgtatttgacgtgcatttccccaggggagggacagtgaacgctttttgaagtggttctttacatcccctttgaggaaatgtctgctcaagtctctggctgggttttgaacagaatcatttgtttgttccattggagttttgacaactctgtgtattctgagcatgagcagtccttgcacgtatatgagatttgcaaatattttgtgccccaatctcaaggttgctctttgatacaaatcaagagcatctgaggcagagcaaaggttcaggtgagaggacggagcatttctccacctctccagcatgcgcagcatctctctcctccgagatgccgagacatgtgtgcagggagacaccatgaaaaagcaggtgtgcttcattctgaatagagcgtctctgattcccgtctggtgcctgagggtgcatggcccatgagccttagaagagacgtcttcgggccttgcacgttggcctccatagaaacttgtggcaaattctgggctccggactgggtgatggaggtagaggtctgagggcagaggtgggcaggggctccaggccatggagatccaagtggaattcttcaggcagagcctgtctccagggactaggcttgggcatttgggatgagccctgggggacggccgctctgtagtcaggtttgaggtagaggacacgccaggaagaagggctgactccatgcacaaggtttgctgggggtcccatcaggggcaggaagccttggggagcctcaccctcttctactgaaggcgccacacacacattctctgctctctgggctctcacagatccattttcaatgtcaatctcccagacagtctctgtactagtgagcaggagccagcgggcatgggcagggtacaagagatccttcagggacatcaagagttgctcagggaccaccaggagctgcacattgaggaggctgagtcgcagggctccctgtgggtccagccccaggaactcctgccccaggcgcaggtgcaggaccattcctggttccaagaccgcgatgatcatcttcctctggggaagctgtgggccctgggggagaaaagccgtgggtcagtcattgtcctctgagggtggctcaaacagggagagagcaaggcggggagctgccagtaacttccccaggcataaatgaaaccccgcagggacacccagaattggcacctgtattgacgccccttgggacggtgatttcctgcaagtcccctagggcctggagctcaggcagacctgtctcacccacgcccacctaggtggtgtgaccttacctggggcagctccaggggcagctgtgcagggtggtggggagctggctgtaccggagctggttctgcacctgtggagagagcagagtgtgcaggtgaaagcccttgtcatgcaggatgcccttgagggttcaaggtgccaccgtgagaaagaccaaatacagaagaagccaggtacaggacacccagccacggagctgcaggaggaagctcccgacactctggacagcacagctgctcgcctcatgacgtgacgggacactggcttggtagcaggggactcaggatgaaaaagagaagatgcctcacctggatgaggacccagctcctccactttctggcgttttggggcatttgatggcgtgccgctggagctgtaggacagagagacacagtcagatttcgggcagttccctaacgtccaattccctgaatccccacaaattcactccacttccctgcctttcattcaaggccacagactcgtcatccacttcctgtgagacctgctcccaatctgtcctaactcccagctgttcttgttctcaccccatctacctgagcttccctgggtgaagaaaaggcagggaaggagggtcggtgcccacagggagcagtttaccctttcaggagctcacgcagatgagagttggaaaactctccttgggtgtgaggagctggagaaagatgttgagatcccggagaggtggcacctctgtctacacaggtaacaaaggaatggggtcttaggattcgaatcacagcaggagaagaggaaggaatttgtcgggcatgacggcatgcgcctgtaatcccagcactttgggaggccaaggtcagaggattgcttgagtccaggagtttgagagcagcctgggcaacatggtgaaagctagtctccactaaaaatactaaacattagtgggtcatggtggtgcatgcctgtggtctcacctactcaggaggctcaggtgggaggatcacctgcgactcagaggtggagcccgcagtcagctaaaatcacgccactgcactccagtgtggaccatcggagtgagacgctgtctcaataaaataaatcagtaaataagacaaatagaaaaattaaaaatgaaaaaaggaggaaactgttttatttttcctagtagatcttgaaactctcacatcatgtcctacaatctcccttcttgcagaacacagaacccattccctgtggagctggttgggtggattgaaagtggggctgccctgagatatgtgtgtggttgcgatgtagaagccttcccagcaccctgtgatgacttacgggcacctcacttccctctggccccaaattcaaaacatccaatctcatggcaggttcatgcacccttttcccttcccctctctccaacacacacccacacatcccacaggcaggtcaccccgcaggcgtccccagcacatagcaaagctcacccgctctctcctgcgtggtcgctcttggattcggtgcaggaatcactggggcttcttgggcgccgggaacctttcatggtgaaaatttccagggttctccaagtcagccactgccagtgtttgtctgtctcctgcaaagatttcttcttggctcccgaatcctttagttcctttgagagagtggtgtcagccccaaagctgctcccgaaggcttgggttgtgtagcgacggggctgtggccagcggcaggtggatgaggctctgacaactgagctcttgggggaatcttgtacactgtcagcagggggtggagccaggggatttgtcagcaggaactgatgtgattggctgttcctggtatgacaacgggaggggccctcatggaggattggggcgtaactcaatcgatagatgaccgatcaacagaacctgcctaaccccatcaagagccaacctgtttcctgtcccctcccatcctctaggtcttgcctaataatgatagacactttctgtcatacccaattcatccatcgctgaaatagtttttcatgtgtgccttttatattttcatgcaaaaaaaatatgttaattttcacgggggctatcctggggaatgctatgtacatgaaatgaagtgtcaaaggagcagaagcagaaggaaattcacaagcttctctgagcgtctctgcttgaattcctgccatgtttcctaaacatgttggcttctttcttcctacccaagtaagaaggtgcttcagaagatcaatcttagggcatttgacaaacgctgctgagaatttcaggatgacacgaaggaacctttgattggatttgtggatgtgcctgtgaaagcgtgtgtgtgtgtgtgtgtgtgtgtgtgtgtgtgtgtgaagccaggatgaagtggctgttcctggggtggagacccttctttctcttgagaatgttcattgctgttgactcattgtgggttttggagatattttctctctttctttcgttctttcagacattttttgctttctccctccctcgatcctaaccaccctccatcccccccctcactccctccctcccgctttccatccttcctccctcccttccctctttccttccttcctgccttcttccattccccttcccctcttccttctgtccttccttcctgtgtgtaaaagaaaaattggtgaatagaagaataattgaataactgcctgagtcacttatacatttctcatctcactctggggacacagaagaccgtgttgtactcatctcctcgattttaaaaacagtcattctaaaatcaaggattctagatgtatcacttctaggcgaaatcttgaaagaaaatgtgtaagagtttcatgtgctcttcatctctatgatcacaattgaagaaggcaggaggttgagatgctgcatcgccaagatcgtggtgattccattatcattacccttgtaacttgtgagcatccttactgccagcaatcattattagatatggaatctgatataggagttcatatttactgtatgaatatcttggtgtgggagtgttggctcatgcctgtaatcccagtgctttgggaggcagaggcaggaggctcgcttgaacccaggagttcgagacaagccggaagagcatggcgagaccctcgtctctacaaaaatgtaaaaatcagccaagtgtgctggtaggtgcctgtagtctcagctccttaggaggctgaagtgttaggatcgctttcgcccgggatgtaatggctacagggagtcgagatcttgccactgaacttcagcctgggcaacagagcaagactctctctcaaaaataaaatgctttttcctttaggcttaaattctaacactcaaacctccaaagcggaggtattaggaggtggggcccttgggagatgatgagattatgaaagtggaaccctcgtaaatgggattagtgcccttctgaaagtgacggaagagagctcgccagcaccttccatgtggggagacagggaggatatgacagtctccaacctggaagagggtcctcaccagaccccgatcatgctggcactctcatcgtggacttccggcctccagaactctgatcaacaaatgtgtgttcttaaagaaaaaaaaagtgtggaaagcaatgttaatgttcccaatcactttgagtacattctttccttaactatgtcttaatgcatagttgtgttggatggcctagtttgtaatgttagaatatgcatgttagtgaattaataaatacagcagtaaagaatagagttgtggttgggaatggtgtctcacgcctgtaatcccagcacaatggcatgccgaggcgggtcaatcacctgtagtcgggaggtggagatcaccctgaccaacatggagaaatcccgactctactaaaaatacaaatcagcctgtcatagaggcacatgcctttaatcccagctactcgggaggctgaggcaggagaatcacttgaacctaggaggcagaggttgcggtgagccgagatcgcgccattgcactccagcctgggcaacaaaagctaaattctatatcaaaaaattaaaaaaaaaaaaaaaagaaggctgtttgttgaccatttgagtggccagtcttggtgcttcctggtgggcgaggagagccctaccccattcctacccattccagtagtcatggcataagagtgattctcgctttctgctatagcctccttatccattggctgaaatgattcttttttaatgtgtcttataaatgcttccatagcaaaaaaaattgaattgacttttatagggactctttcggggattgttacccatcattccataatttgtttgtactcctagaaaagggaagtatgccgagcacagtggatatttcgtctcaaataataaataaataaccaaatagaaaagaaagaaaaggaagtaaagggaaatatacaaatatacaaggtgttaggagagagttgctaatcgtgattcccccttaattgtccaaacagaccacctctggggatctattcgtaaaagactcgttagaagtgcagactcatgcatttgagaatcactcagggaaatctgaagatgacctgtggtgggggtgtaaatggatacttaaatgtgtcttgtgattgtgtgagagtgtgactgtgtgtttgtgtgtgtgctgtcatctgtggagtgggggatcctcttttgccttgagaaagctcatctctgtccacttactctgggctctaccatctgtgccttgtatccagtagaaataaaacagtttgcggcagaaatggagttttattttattttactttactttttattaggattatttgtagaccgggtctcactctgtcactcaggcgggagtgcaacggcacgatctcagatcactgcaacctgtgcctcctgcactgaagccatcctcccacctcagcctctggagtggggagatcccacacctgtgtaatttttgcattttttctagagatggggtttcctcatgctgcccgggctggtttccaacgcccgggctcaagtgatccacccgcctcagcctcccaaagtgctgggattacaggtgggagctactgtgcccggccagaaatggagatttttgttcttcttttgatgagacggaacctcgcaccgtggcccaggctggagtgcagtggagtgacctcggctcactgcaagctctgcctcctggggtcatgccattctcctgcctcagcctcccaaagagctgggactacaggcgcccgacaccacgcccagctaaggtttttgcatttatttttttattttttttgtagggacgggctttcaccgtgttagccaggacggtctcgatctcctgccctcgtgatgcacccgcctgagcctcccgaagtgctcggattacaggcatgagccaccatgcacggcccagaaatggagatttttgagcaaacacattaaagaaaagaaacgcaaatagacgaaactcattttaacatttttatttaacccaaggaatacagatataatcaacaccaatacaattgatgtcacagtgatgactaagatacatgctacaatccttcattctcagatgcaaaatctagtatgtgttttacagcaaacgtcagttggaaactgaacgtcgatcacacatgcttgatgtgcatgtcaatttcatgagagttacaatctcaggagaagtctcacatagcgtaagagtccaaacataccttcaagtgtttcgacaagttcttcactactcattcttagaactgaatttaccaacaacaatcccagcctattcattgctgaactgcatcccattgaaagaatgggtcacagttcctctctctagacactgtggaacgacattgaaggcccctccatcttttggcgattgtgaggacaggtgctagaagcctctgccctcagccttgtccacgtgaattctaattcctttagaacaactatctcagggtgggaaagatggttccaatgctaagtgcctattgcattgattatgaatcaatgaaactctttctccctgggggttgtcccagttggattccaagcagcactgtcagagtgttccagcttctccacatgctccgcagcccttgggatggtgagtgattgtctcggtggcttctgggagagcttcttggttgttgttgaaggtgtatttgacgtgcatttccccaggggagggacagtgaacgctttttgaagtggttctttacatcccctttgaggaaatgtctgctcaagtctctggctgggttttgaacagaatcatttgtttgttccattggagttttgacaactctgtgtattctgagcatgagcagtccttgcacgtatatgagatttgcaaatattttgtgccccaatctcaaggttgctctttgatacaaatcaagagcatctgaggcagagcaaaggttcaggtgagaggacggagcatttctccacctctccagcatgcgcagcatctctctcctccgagatgccgagacatgtgtgcagggagacaccatgaaaaagcaggtgtgcttcattctgaatagagcgtctctgattcccgtctggtgcctgagggtgcatggcccatgagccttagaagagacgtcttcgggccttgcacgttggcctccatagaaacttgtggcaaattctgggctccggactgggtgatggaggtagaggtctgagggcagaggtgggcaggggctccaggccatggagatccaagtggaattcttcaggcagagcctgtctccagggactaggcttgggcatttgggatgagccctgggggacggccgctctgtagtcaggtttgaggtagaggacacgccaggaagaagggctgactccatgcacaaggtttgctgggggtcccatcaggggcaggaagccttggggagcctcaccctcttctactgaaggcgccacacacacattctctgctctctgggctctcacagatccattttcaatgtcaatctcccagacagtctctgtactagtgagcaggagccagcgggcatgggcagggtacaagagatccttcagggacatcaagagttgctcagggaccaccaggagctgcacattgaggaggctgagtcgcagggctccctgtgggtccagccccaggaactcctgccccaggcgcaggtgcaggaccattcctggttccaagaccgcgatgatcatcttcctctggggaagctgtgggccctgggggagaaaagccgtgggtcagtcattgtcctctgagggtggctcaaacagggagagagcaaggcggggagctgccagtaacttccccaggcataaatgaaaccccgcagggacacccagaattggcacctgtattgacgccccttgggacggtgatttcctgcaagtcccctagggcctggagctcaggcagacctgtctcacccacgcccacctaggtggtgtgaccttacctggggcagctccaggggcagctgtgcagggtggtggggagctggctgtaccggagctggttctgcacctgtggagagagcagagtgtgcaggtgaaagcccttgtcatgcaggatgcccttgagggttcaaggtgccaccgtgagaaagaccaaatacagaagaagccaggtacaggacacccagccacggagctgcaggaggaagctcccgacactctggacagcacagctgctcgcctcatgacgtgacgggacactggcttggtagcaggggactcaggatgaaaaagagaagatgcctcacctggatgaggacccagctcctccactttctggcgttttggggcatttgatggcgtgccgctggagctgtaggacagagagacacagtcagatttcgggcagttccctaacgtccaattccctgaatccccacaaattcactccacttccctgcctttcattcaaggccacagactcgtcatccacttcctgtgagacctgctcccaatctgtcctaactcccagctgttcttgttctcaccccatctacctgagcttccctgggtgaagaaaaggcagggaaggagggtcggtgcccacagggagcagtttaccctttcaggagctcatgcagatgagagttggaaaactctccttgggtgtgaggagctggagaaagatgttgagatcccggagaggtggcacctctgtctacacaggtaacaaaggaatggggtcttaggattcgaatcacagcaggagaagaggaaggaatttgtcgggcatgacggcatgcgcctgtaatcccagcactttgggaggccaaggtcggaggattgcttgagtccaggagtttgagagcagcctgggcaacatggtgaaagctagtctccactaaaaatactaaacattagtgggtcatggtggtgcatgcctgtggtctcacctactcaggaggctcaggtgggaggatcacctgcgactcagaggtggagcccgcagtcagctaaaatcacgccactgcactccagtgtggaccatcggagtgagacgctgtctcaataaaataaatcagtaaataagacaaatagaaaaattaaaaatgaaaaaaggaggaaactgttttatttttcctagtagatcttgaaactctcacatcatgtcctacaatctcccttcttgcagaacacagaacccattccctgtggagctggttgggtggattgaaagtggggctgccctgagatatgtgtgtggttgcgatgtagaagccttcccagcaccctgtgatgacttacgggcacctcacttccctctggccccaaattcaaaacatccaatctcatggcaggttcatgcacccttttcccttcccctctctccaacacacacccacacatcccacaggcaggtcaccccgcaggcgtccccagcacatagcaaagctcacccgctctctcctgcgtggtcgctcttggattcggtgcaggaatcactggggcttcttgggcgccgggaacctttcatggtgaaaatttccagggttctccaagtcagccactgccagtgtttgtctgtctcctgcaaagatttcttcttggctcccgaatcctttagttcctttgagagagtggtgtcagccccaaagctgctcccgaaggcttgggttgtgtagcgacggggctgtggccagcggcaggtggatgaggctctgacaactgagctcttgggggaatcttgtacactgtcagcagggggtggagccaggggatttgtcagcaggaactgatgtgattggctgttcctggtatgacaacgggaggggccctcatggaggattggggcgtaactcaatcgatagatgaccgatcaacagaacctgcctaaccccatcaagagccaacctgtttcctgtcccctcccatcctctaggtcttgcctaataatgatagacactttctgtcatacccaattcatccatcgctgaaatagtttttcatgtgtgccttttatattttcatgcaaaaaaaatatgttaattttcacgggggctatcctggggaatgctatgtacatgaaatgaagtgtcaaaggagcagaagcagaaggaaattcacaagcttctctgagcgtctctgcttgaattcctgccatgtttcctaaacatgttggcttctttcttcctacccaagtaagaaggtgcttcagaagatcaatcttagggcatttgacaaacgctgctgagaatttcaggatgacacgaaggaacctttgattggatttgtggatgtgcctgtgaaagcgtgtgtgtgtgtgtgtgtgtgtgtgtgtgtgtgtgtgaagccaggatgaagtggctgttcctggggtggagacccttctttctcttgagaatgttcattgctgttgactcattgtgggttttggagatattttctctctttctttcgttctttcagacattttttgctttctccctccctcgatcctaaccaccctccatcccccccctcactccctccctcccgctttccatccttcctccctcccttccctctttccttccttcctgccttcttccattccccttcccctcttccttctgtccttccttcctgtgtgtaaaagaaaaattggtgaatagaagaataattgaataactgcctgagtcacttatacatttctcatctcactctggggacacagaagaccgtgttgtactcatctcctcgattttaaaaacagtcattctaaaatcaaggattctagatgtatcacttctaggcgaaatcttgaaagaaaatgtgtaagagtttcatgtgctcttcatctctatgatcacaattgaagaaggcaggaggttgagatgctgcatcgccaagatcgtggtgattccattatcattacccttgtaacttgtgagcatccttactgccagcaatcattattagatatggaatctgatataggagttcatatttactgtatgaatatcttggtgtgggagtgttggctcatgcctgtaatcccagtgctttgggaggcagaggcaggaggctcgcttgaacccaggagttcgagacaagccggaagagcatggcgagaccctcgtctctacaaaaatgtaaaaatcagccaagtgtgctggtaggtgcctgtagtctcagctccttaggaggctgaagtgttaggatcgctttcgcccgggatgtaatggctacagggagtcgagatcttgccactgaacttcagcctgggcaacagagcaagactctctctcaaaaataaaatgctttttcctttaggcttaaattctaacactcaaacctccaaagcggaggtattaggaggtggggcccttgggagatgatgagattatgaaagtggaaccctcgtaaatgggattagtgcccttctgaaagtgacggaagagagctcgccagcaccttccatgtggggagacagggaggatatgacagtctccaacctggaagagggtcctcaccagaccccgatcatgctggcactctcatcgtggacttccggcctccagaactctgatcaacaaatgtgtgttcttaaagaaaaaaaaagtgtggaaagcaatgttaatgttcccaatcactttgagtacattctttccttaactatgtcttaatgcatagttgtgttggatggcctagtttgtaatgttagaatatgcatgttagtgaattaataaatacagcagtaaagaatagagttgtggttgggaatggtgtctcacgcctgtaatcccagcacaatggcatgccgaggcgggtcaatcacctgtagtcgggaggtggagatcaccctgaccaacatggagaaatcccgactctactaaaaatacaaatcagcctgtcatagaggcacatgcctttaatcccagctactcgggaggctgaggcaggagaatcacttgaacctaggaggcagaggttgcggtgagccgagatcgcgccattgcactccagcctgggcaacaaaagctaaattctatatcaaaaaattaaaaaaaaaaaaaaaagaaggctgtttgttgaccatttgagtggccagtcttggtgcttcctggtgggcgaggagagccctaccccattcctacccattccagtagtcatggcataagagtgattctcgctttctgctatagcctccttatccattggctgaaatgattcttttttaatgtgtcttataaatgcttccatagcaaaaaaaattgaattgacttttatagggactctttcggggattgttacccatcattccataatttgtttgtactcctagaaaagggaagtatgccgagcacagtggatatttcgtctcaaataataaataaataaccaaatagaaaagaaagaaaaggaagtaaagggaaatatacaaatatacaaggtgttaggagagagttgctaatcgtgattcccccttaattgtccaaacagaccacctctggggatctattcgtaaaagactcgttagaagtgcagactcatgcatttgagaatcactcagggaaatctgaagatgacctgtggtgggggtgtaaatggatacttaaatgtgtcttgtgattgtgtgagagtgtgactgtgtgtttgtgtgtgtgctgtcatctgtggagtgggggatcctcttttgccttgagaaagctcatctctgtccacttactctgggctctaccatctgtgccttgtatccagtagaaataaaacagtttgcggcagaaatggagttttattttattttactttactttttattaggattatttgtagaccgggtctcactctgtcactcaggcgggagtgcaacggcacgatctcagatcactgcaacctgtgcctcctgcactgaagccatcctcccacctcagcctctggagtggggagatcccacacctgtgtaatttttgcattttttctagagatggggtttcctcatgctgcccgggctggtttccaacgcccgggctcaagtgatccacccgcctcagcctcccaaagtgctgggattacaggtgggagctactgtgcccggccagaaatggagatttttgttcttcttttgatgagacggaacctcgcaccgtggcccaggctggagtgcagtggagtgacctcggctcactgcaagctctgcctcctggggtcatgccattctcctgcctcagcctcccaaagagctgggactacaggcgcccgacaccacgcccagctaaggtttttgcatttatttttttattttttttgtagggacgggctttcaccgtgttagccaggacggtctcgatctcctgccctcgtgatgcacccgcctgagcctcccgaagtgctcggattacaggcatgagccaccatgcacggcccagaaatggagatttttgagcaaacacattaaagaaaagaaacgcaaatagacgaaactcattttaacatttttatttaacccaaggaatacagatataatcaacaccaatacaattgatgtcacagtgatgactaagatacatgctacaatccttcattctcagatgcaaaatctagtatgtgttttacagcaaacgtcagttggaaactgaacgtcgatcacacatgcttgatgtgcatgtcaatttcatgagagttacaatctcaggagaagtctcacatagcgtaagagtccaaacataccttcaagtgtttcgacaagttcttcactactcattcttagaactgaatttaccaacaacaatcccagcctattcattgctgaactgcatcccattgaaagaatgggtcacagttcctctctctagacactgtggaacgacattgaaggcccctccatcttttggcgattgtgaggacaggtgctagaagcctctgccctcagccttgtccacgtgagttctaattcctttagaacaactatctcagggtgggaaagatggttccaatgctaagtgcctattgcattgattatgaatcaatgaaactctttctccctgggggttgtcccagttggattccaagcagcactgtcagagtgttccagcttctccacatgctccgcagcccttgggatggtgagtgattgtctcggtggcttctgggagagcttcttggttgttgttgaaggtgtatttgacgtgcatttccccaggggagggacagtgaacgctttttgaagtggttctttacatcccctttgaggaaatgtctgctcaagtctctggctgggttttgaacagaatcatttgtttgttccattggagttttgacaactctgtgtattctgagcatgagcagtccttgcacgtatatgagatttgcaaatattttgtgccccaatctcaaggttgctctttgatacaaatcaagagcatctgaggcagagcaaaggttcaggtgagaggacggagcatttctccacctctccagcatgcgcagcatctctctcctccgagatgccgagacatgtgtgcagggagacaccatgaaaaagcaggtgtgcttcattctgaatagagcgtctctgattcccgtctggtgcctgagggtgcatggcccatgagccttagaagagacgtcttcgggccttgcacgttggcctccatagaaacttgtggcaaattctgggctccggactgggtgatggaggtagaggtctgagggcagaggtgggcaggggctccaggccatggagatccaagtggaattcttcaggcagagcctgtctccagggactaggcttgggcatttgggatgagccctgggggacggccgctctgtagtcaggtttgaggtagaggacacgccaggaagaagggctgactccatgcacaaggtttgctgggggtcccatcaggggcaggaagccttggggagcctcaccctcttctactgaaggcgccacacacacattctctgctctctgggctctcacagatccattttcaatgtcaatctcccagacagtctctgtactagtgagcaggagccagcgggcatgggcagggtacaagagatccttcagggacatcaagagttgctcagggaccaccaggagctgcacattgaggaggctgagtcgcagggctccctgtgggtccagccccaggaactcctgccccaggcgcaggtgcaggaccattcctggttccaagaccgcgatgatcatcttcctctggggaagctgtgggccctgggggagaaaagccgtgggtcagtcattgtcctctgagggtggctcaaacagggagagagcaaggcggggagctgccagtaacttccccaggcataaatgaaaccccgcagggacacccagaattggcacctgtattgacgccccttgggacggtgatttcctgcaagtcccctagggcctggagctcaggcagacctgtctcacccacgcccacctaggtggtgtgaccttacctggggcagctccaggggcagctgtgcagggtggtggggagctggctgtaccggagctggttctgcacctgtggagagagcagagtgtgcaggtgaaagcccttgtcatgcaggatgcccttgagggttcaaggtgccaccgtgagaaagaccaaatacagaagaagccaggtacaggacacccagccacggagctgcaggaggaagctcccgacactctggacagcacagctgctcgcctcatgacgtgacgggacactggcttggtagcaggggactcaggatgaaaaagagaagatgcctcacctggatgaggacccagctcctccactttctggcgttttggggcatttgatggcgtgccgctggagctgtaggacagagagagagacacagtcagatttcgggcagttccctaacgtccaattccctgaatccccacaaattcactccacttccctgcctttcattcaaggccacagactcgtcatccacttcctgtgagacctgctcccaatctgtcctaactcccagctgttcttgttctcaccccatctacctgagcttccctgggtgaagaaaaggcagggaaggagggtcggtgcccacagggagcagtttaccctttcaggagctcatgcagatgagagttggaaaactctccttgggtgtgaggagctggagaaagatgttgagatcccggagaggtggcacctctgtctacacaggtaacaaaggaatggggtcttaggattcgaatcacagcaggagaagaggaaggaatttgtcgggcatgacggcatgcgcctgtaatcccagcactttgggaggccaaggtcggaggattgcttgagtccaggagtttgagagcagcctgggcaacatggtgaaagctagtctccactaaaaatactaaacattagtgggtcatggtggtgcatgcctgtggtctcacctactcaggaggctcaggtgggaggatcacctgcgactcagaggtggagcccgcagtcagctaaaatcacgccactgcactccagtgtggaccatcggagtgagacgctgtctcaataaaataaatcagtaaataagacaaatagaaaaattaaaaatgaaaaaaggaggaaactgttttatttttcctagtagatcttgaaactctcacatcatgtcctacaatctcccttcttgcagaacacagaacccattccctgtggagctggttgggtggattgaaagtggggctgccctgagatatgtgtgtggttgcgatgtagaagccttcccagcaccctgtgatgacttacgggcacctcacttccctctggccccaaattcaaaacatccaatctcatggcaggttcatgcacccttttcccttcccctctctccaacacacacccacacatcccacaggcaggtcaccccgcaggcgtccccagcacatagcaaagctcacccgctctctcctgcgtggtcgctcttggattcggtgcaggaatcactggggcttcttgggcgccgggaacctttcatggtgaaaatttccagggttctccaagtcagccactgccagtgtttgtctgtctcctgcaaagatttcttcttggctcccgaatcctttagttcctttgagagagtggtgtcagccccaaagctgctcccgaaggcttgggatgtgtagcgacggggctgtggccagcggcaggtggatgaggctctgacaactgagctcttgggggaatcttgtacactgtcagcagggggtggagccaggggatttgtcagcaggaactgatgtgattggctgttcctggtatgacaacgggaggggccctcatggaggattggggcgtaactcaatccatagatgaccgatcaacagaacctgcctaatcccatcaagagccaacctgtttcctgtcccctcccatcctctaggtcttgcctaataatgatagacactttctgtcatacccaattcatccatcgctgaaatagtttttcatgtgtgccttttatattttcatgcaataaaaatatgttaattttcacggtggctatcctggggaatgctatgtacatgaaatgaagtgtcaaaggagcagaagcagaaggaaattcacaagcttctctgagcgtctctgcttcaattcctgccatgtttcctaaacatgttggcttctttcttcctacccaagtaagaaggtgcttcagaagttcaatcttagggcatttgacaaacgccgctgagaatttcaggatgacacgaaggaacctttgattggatttgtggatgtgcctgtgaaagcgtgtgtgtgtgtgtgtgtgtgtgtgtgtgtgtgtgtgtgtgtgtgaagccaggatgaagtggctgttcctggggtggagacccttctttctcttgagaatgttcattgctgttgactcattgtgggttttggagatattttctctctttctttcgttctttcagacattttttgctttctccctccctcgatcctaacccccctccatccccccctcactccctccctccctctttccatccttcctccctcccttccctctttccttccttcctgccttcttcccttccccttcccctcttccacgcctgtaatcccagcacaatggcatgccgaggcgggtcaatcacctgtagtcgggaggtggagatcaccctgaccaacatggagaaacccgactctactaaaaatacaaatcagcctgtcatagaggcacatgcctttaatcccagctactcgggaggctgaggcaggagaatcacttgaacctaggaggcagaggttgcggtgagccgagatcgcgccattgcactccagcctgggcaacaaaagctaaattctatatcaaaaaattaaaaaaaaaaaaaagaaggctgtttgttgaccatttgagtggccagtcttggtgcttcctggtgggcgaggagagccctgccccattcctacccattccagtagtcatggcataagagtgattctcactttctgctatagcctccttatccattggctgaaatgattgttttttaatgtgtcttataaatgcttccatagcaaaaaaaattgaattgacttttatagggactctttcgggtattgttacccatcattctataatttgtttgtactcctagaaaagggaagtatgccgagcacagtggatatttcgtctcaaataacaaataaataaccaaatagaaaagaaagaaaaggaagtaaagggaaatatacaaatatacaaggtgttaggagagagttgctaatcgtgattcccccttaattgtccaaacagaccacctctggggatctattcgtaaaagactcgttagaagtgcagactcatgcatttgagaatcactcagggaaatctgaagatgacctgtggtgggggtgtaaatggatacttaaatgtgtcttgtgattgtgtgagagtgtgactgtgtgtttgtgtgtgtgctgtcatctgtggagtgggggatcctcttttgccttgagaaagctcatctctgtccacttactctgggctctaccatctgtgccttgtatccagtagaaataaaacagtttgcggcagaaatggagttttattttattttactttactttttattaggattatttgtagaccgggtctcactctgtcactcaggctggagtgcaacggcacgatctcagatcactgcaacctgtgcctcctgcactgaagccatcctcccacctcagcctctggagtggggagatcccacacctgtgtaatttttgcattttttctagagatggggtttcctcatgctgcccgggctggtttccaacgcccgggctcaagtgatccacccgcctcagcctcccaaagtgctgggattacaggtgggagctactgtgcccggccagaaatggagatttttgttcttcttttgatgagacggaacctcgcaccgtggcccaggctggagtgcagtggagtgacctcggctcactgcaagctctgcctcctgaggtcatgccattctcctgcctcagcctcccaaagagctgggactacaggcgcccgacaccacgcccagctaaggtttttgcatttattttttttttttttgtagggacgggctttcaccgtgttagccaggacggtctcgatctcctgccctcgtgatgcacccgcctgagcctcccgaagtgctcggattacaggcatgagccaccatgcacggcccagaaatggagatttttgagcaaacacattaaagaaaagaaacgcaaatagacgaaactcattttaacatttttatttaacccaaggaatacagatataatcaacaccaatacaattgatgtcacagtgatgactaagatacatgctacaatccttcattctcagatgcaaaatctagtatgtgttttacagcaaacgtcagttggaaactgaacgtcgatcacacatgcttgatgtgcatgtcaatttcatgagagttacaatctcaggagaagtctcacatagcgtaagagtccaaacataccttcaagtgtttcgacaagttcttcactactcattcttagaactgaatttaccaacaacaatcccagcctattcattgctgaactgcatcccattgaaagaatgggtcacagttcctctctctagacactgtggaacgacattgaaggcccttccatcttttggcgattgtgaggacaggtgctagaagcctctgccctcagccttgtccacgtgagttctaattcctttagaacaactatctcagggtgggaaagatggttccaatgctaagtgcctattgcattgattatgaatcaatgaaactctttctccctgggggttgtcccagttggattccaagcagcactgtcagagtgttccagcttctccacatgctccgcagcccttgggatggtgagtgattgtcacggtggcttctgggagagcttcttggttgttgttgaaggtgtatttgacgtgcatttccccaggggagggacagtgaacgctttttgaagtggttctttacatcccctttgaggaaatgtctgctcaagtctctggctgggttttgaacagaatcatttgtttgtcccattggagttttgacaactctgtgtattctgagtatgagcagtccttgcacgtatatgagatttgcaaatattttgtgccccaatctcaaggttgctctttgatacaaatcaagagcatctgaggcagagcaaaggttcaggtgagaggacggagcatttctccacctctccagcatgcgcagcatctctctcctccgagatgccgagacatgtgtgcagggagacaccatgaaaaagcaggtgtgcttcattctgaatagagcgtctctgattcccgtctggtgcctgagggtgcatggcccatgagccttagaagagacgtcttcgggccttgcacgttggcctccatagaaacttgtggcaaattctgggctccggactgggtgatggaggtagaggtctgagggcagaggtgggcaggggctccaggccgtggagatccaagtggaattcttcaggcagagcctgtctccagggactaggcttgggcatttgggatgagccctgggggacggccgctctgtagtcaggtttgaggtagaggacacgccaggaagaagggctgactccatgcacaaggtttgctgggggtcccatcaggggcaggaagccttggggagcctcaccctcttctactgaaggcgccacacacacattctctgctctctgggctctcacagatccattttcaatgtcaatctcccagacagtctctgtactagtgagcaggagccagcgggcatgggcagggtacaagagatccttcagggacatcaagagttgctcagggaccaccaggagctgcacattgaggaggctgagtcgcagggctccctgtgggtccagccccaggaactcctgccccaggcgcaggtgcaggaccattcctggttccaagaccgcgatgatcatcttcctctggggaagctgtgggccctgggggagaaaagccgtgggtcagtcattgtcctctgagggtggctcaaacagggagagagcaaggcggggagctgccagtaacttccccaggcataaatgaaaccccgcagggacacccagaattggcacctgtattgacgccccttgggacggtgatttcctgcaagtcccctagggcctggagctcaggcagacctgtctcacccacgcccacctaggtggtgtgaccttacctggggcagctccaggggcagctgtgcagggtggtggggagctggctgtaccggagctggttctgcacctgtggagagagcagagtgtgcaggtgaaagcccttgtcatgcaggatgcccttgagggttcaaggtgccaccgtgagaaagaccaaatacagaagaagccaggtacaggacacccagccacggagctgcaggaggaagctcccgacactctggacagcacagctgctcgcctcatgacgtgacgggacactggcttggtagcaggggactcaggatgaaaaagagaagatgcctcacctggatgaggacccagctcctccactttctggcgttttggggcatttgatggcgtgccgctggagctgtaggacagagagacacagtcagatttcgggcagttccctaacgtccaattccctgaatccccacaaattcactccacttccctgcctttcattcaaggccacagactcgtcatccacttcctgtgagacctgctcccaatctgtcctaactcccagctgttcttgttctcaccccatctacctgagcttccctgggtgaagaaaaggcagggaaggagggtcggtgcccacagggagcagttgaccctttcaggagctcatgcagatgagagttggaaaactctccttgggtgtgaggagctggagaaagatgttgagatcccggagaggtggcacctctgtctacacaggtaacaaaggaatggggtcttaggattcgaatcacagcaggagaagaggaaggaatttgtcgggcatgacggcatgcgcctgtaatcccagcactttgggaggccaaggtcggaggattgcttgagtccaggagtttgagagcagcctgggcaacatggtgaaagctagtctccactaaaaatactaaacattagtgggtcatggtggtgcatgcctgtggtctcacctactcaggaggctcaggtgggaggatcacctgcgactcagaggtggagcccgcagtcagctaaaatcacgccactgcactccagtgtggaccatcggagtgagacgctgtctcagtaaaataaatcagtaaataagacaaatagaaaaattaaaaatgaaaaaaggaggaaactgttttatttttcctagtagatcttgaaactctcacatcatgtcctacaatctcccttcttgcagaacacagaacccattccctgtggagctggttgggtggattgaaagtggggctgccctgagatatgtgtgtggttgcgatgtagaagccttcccagcaccctgtgatgacttacgggcacctcacttccctctggccccaaattcaaaacatccaatctcatggcaggttcatgcacccttttcccttcccctctctccaacacacacccacacatcccacaggcaggtcaccccgcaggcgtccccagcacatagcaaagctcacccgctctctcctgcgtggtcgctcttggattcggtgcaggaatcactggggcttcttgggcgccgggaacctttcatggtgaaaatttccagggttctccaagtcagccactgccagtgtttgtctgtctcctgcaaagatttcttcttggctcccgaatcctttagttcctttgagagagtggtgtcagccccaaagctgctcccgaaggcttgggttgtgtagcgacggggctgtggccagcggcaggtggacgaggctccgacaactgagctcttgggggaatcttgtacactgtcagcagggggtggagccaggggatttgtcagcaggaactgatgtgattggctgttcctggtatgacaacgggaggggccctcatggaggattggggcgtaactcaatccatagatgaccgatcaacagaacctgcctaatcccatcaagagccaacctgtttcctgtcccctcccatcctctaggtcttgcctaataatgatagacactttctgtcatacccaattcatccatcgctgaaatagtttttcatgtgtgccttttatattttcatgcaataaaaatatgttaattttcacggtggccatcctggggaatgctatgtacatgaaatgaagtgtcaaaggagcagaagcagaaggaaattcacaagcttctctgagcgtctctgcttcaattcctgccatgtttcctaaatatgttggcttctttcttcctacccaagtaagaaggtgcttcagaagatcaatcttatggcatttgacaaaccctgctgagaatttcaggatgacacgaaggaacctttgattggatttgtggatgtgcctgtgaaagcgtgtgtgtgtgtgtgtgtgtgtgtgtgtgtgtgtgtgtgaagccaggatgaagtggctgttcctggggtggagacccttctttctcttgagaatgttcattgctgttgactcattgtgggttttggagatattttctctctttctttcgttctttcagacattttttgctttctccctccctggatcctaacccccctccatcccccccctcactccctccctccttgtttccatccttcctccctcccttccctctttccttccttcctgccttcttcccttccccttcccctcttccttctgtccttccttcctgtgtgtaaaagaaaaattggtgaatagaagaataattgaataactgcctgagtcacttatacatttctcatctcactctggggacacagaagaccgtgttgtactcatctcctcgattttaaaaacagtcattctaaaatcaaggattctagatgtatcacttctaggcgaaatcttgaaagagaatgtgtaagagtttcatgtgctcttcatctctatgatcacaattgaagaaggcaggaggttgagatgctgcatcgccaagatcgtggtgattccattatcattacccttgtaacttgtgagcatccttactgccagcaatcattattagatatggaatctgatataggagttcatatttactgtatgaatatcttggtgtgggagtgttggctcatgcctgtaatcccagtgctttgggaggcagaggcaggaggctcgcttgaacccaggagttcgagacaagccggaagagcatggcgagaccctcgtctctacaaaaatgtaaaaatcagccaagtgtgctggtaggtgcctgtagtctcagctccttaggaggctgaagtgttaggatcgctttcgcccgggatgtaatggctacagggagtcgagatcttgccactgaacttcagcctgggcaacagagcaagactctctctcaaaaataaaatgctttttcctttaggcttaaattctaacactcaaacctccaaagcggaggtattaggaggtggggcccttgggagatgatgagattatgaaagtggaaccctcgtaaatgggattagtgcccttctgaaagtgacggaagagagctcgccagcaccttccatgtggggagacagggaggatatgacagtctccaacctggaagagggtcctcaccagaccccgatcatgctggcactctcatcgtggacttccggcctccagaactctgatcaacaaatgtgtgttcttaaagaaaaaaaaagtgtggaaagcaatgttaatgttcccaatcactttgagtacattctttccttaactatgtcttaatgcatagttgtgttggatggcctagtttgtaatgttagaatatgcatgttagtgaattaataaatacagcagtaaagaatagagttgtggttgggaatggagtctcacgcctgtaatcccagcacaatggcatgccgaggcgggtcaatcacctgtagtcgggaggtggagatcaccctgaccaacatggagaaacccgactctactaaaaatacaaatcagcctgtcatagaggcacatgcctttaatcccagctactcgggaggctgaggcaggagaatcacttgaacctaggaggcagaggttgcggtgagccgagatcgcgccattgcactccagcctgggcaacaaaagctaaattctatatcaaaaaattaaaaaaaaaaaaaagaaggctgtttgttgaccatttgagtggccagtcttggtgcttcctggtgggcgaggagagccctgccccattcctacccattccagtagtcatggcataagagtgattctcactttctgctatagcctccttatccattggctgaaatgattcttttttaatgtgtcttattaatgcttccatagcaaaaaatattgaattgacttttatagggactctttcggggattgttacccatcattccataatttgtttgtactcctagaaaagggaagtatgccgagcacagtggatatttcgtctcaaataataaataaataaccaaatagaaaagaaagaaaaggaagtaaagggaaatatacaaatatacaaggtgttaggagagagttgctaatcgtgattcccccttaattgtccaaacagaccacctctggggatctattcgtaaaagactcgttagaagtgcagactcatgcatttgagaatcactcagggaaatctgaagatgacctgtggtgggggtgtaaatggatacttaaatgtgtcttgtgattgtgtgagagtgtgactgtgtgtttgtgtgtgtgctgtcatctgtggagtgggggatcctcttttgccttgagaaagctcatctctgtccacttactctgggctctaccatctgtgccttgtatccagtagaaataaaacagtttgcggcagaaatggagttttattttatttcactttactttttattaggattatttgtagaccgggtctcactctgtcactcaggctggagtgcaatggcacgatctcagatcactgcaacctgtgcctcctgcactgaagccatcctcccacctcagcctctggagtggggagatcccacacctgtgtaatttttgcattttttctagagatggggtttcctcatgctgcccgggctggtttccaacgcctgggctcaagtgatccacccgcctcagcctcccaaagtgctgggattacaggtgggagctactgtgcccggccagagatggagatttttgttcttcttttgatgagacggaacctcgcaccgtggcccaggctggagtgcagtggagtgacctcggctcactgcaagctctgcctcctggggtcatgccattctcctgcctcagcctcccaaagagctgggactacaggcgcccgacaccacgcccagctaaggtttttgcatttttttttttttttgtagggacgggctttcaccgtgttagccaggacggtctcgatctcctgccctcgtgatgcacccgcctgagcctcccgaagtgctcggattacaggcatgagccaccatgcacggcccagaaatggagatttttgagcaaacacattaaagaaaagaaacgcaaatagacgaaactcattttaacatttttatttaacccaaggaatacagatataatcaacaccaatacaattgatgtcacaatgatgactaagatacctgctacaatccttcattctcagatgcaaaatctagtatgtgttttacagcaaacgtcagttggaaactgaacgtcgatcacacatgcttgatgtgcatgtcaatttcatgagagttacaatctcaggagaagtctcacatagcgtaagagtccaaacataccttcaagtgtttcgacaagttcttcactactcattcttagaactgaatttaccaacaacaatcccagcctattcattgctgaactgcatcccattgaaagaatgggtcacagttcctctctctagacactgtggaacgacattgaaggcccctccatcttttggcgattgtgaggacaggtgctagaagcctctgccctcagccttgtccacgtgagttctaattcctttagaacaactatctcagggtgggaaagatggttccaatgctaagtgcctattgcattgattatgaatcaatgaaactctttctccctgggggttgtcccagttggattccaagcagcactgtcagagtgttccagcttctccacatgctccgcagcccttgggatggtgagtgattgtcacggtggcttctgggagagcttcttggttgttgttgaaggtgtatttgacgtgcatttccccaggggagggacagtgaacgctttttgaagtggttctttacatcccctttgaggaaatgtctgctcaagtctctggctgggttttgaacagaatcatttgtttgtcccattggagttttgacaactctgtgtattctgagtatgagcagtccttgcacgtatatgagatttgcaaatattttgtgccccaatctcaaggttgctctttgatacaaatcaagaacatctgaggcagagcaaaggttcaggtgagaggacggagcatttctccacctctccagcatgcgcagcatctctctcctccgagatgccgagacatgtgtgcagggagacaccatgaaaaagcaggtgtgcttcattctgaatagagcgtctctgattcccgtctggtgcctgagggtgcatggcccatgagccttagaagagacgtcttcgggccttgcacgttggcctccatagaaacttgtggcaaattctgggctccggactgggtgatggaggtagaggtctgagggcagaggtgggcaggggctccaggccgtggagatccaagtggaattcttcaggcagagcctgtctccagggactaggcttgggcatttgggatgagccctgggggacggccgctctgtagtcaggtttgaggtagaggacacgccaggaagaagggctgactccatgcacaaggtttgctgctccaagtcagccactgccagtgtttgtctgtctcctgcaaagatttcttcttggctcccgaatcctttagttcctttgagagagtggtgtcagccccaaagctgctcccgaaggcttgggttgtgtagcgacggggctgtggccagcggcaggtggatgaggctctgacaactgagctcttgggggaatcttgtacactgtcagcagggggtggagccaggggatttgtcagcaggaactgatgtgattggctgttcctggtatgacaacgggaggggccctcatggaggattggggcgtaactcaatccatagatgaccgatcaacagaacctgcctaatcccatcaagagccaacctgtttcctgtcccctcccatcctctagctcttgcctaataatgatagacactttctgtcatacccaattcatccatcgctgaaatagtttttcatgtgtgccttttatattttcatgcaataaaaatatgttaattttcacggtggctatcctggggaatgctatgtacatgaaatgaagtgtcaaaggagcagaagcagaaggaaattcacaagcttctctgagcgtctctgcttgaattcctgccatgtttcctaaacatgttggcttctttcttcctacccaagtaagaaggtgcttcagaagatcaatcttagggcatttgacaaacgctgctgagaatttcaggatgacacgaaggaacctttgattggatttgtggatgtgcctgtgaaagcgtgtgtgtgtgtgtgtgtgtgtgtttgtgtgtgtgtgaagccaggatgaagtggctgttcctggggtggagacccttctttctcttgagaatgttcattgctgttgactcattgtgggttttggagatattttctctctttctttcgttctttcagacattttttgctttctccctccctcgatcctaacccccctctttccccccctcactccctccctccctctttccatccttcctccctcccttccctctttccttccttcctgccttcttcccttccccttcccctcttccttccgtccttccttcctgtgtgtaaaagaaaaattggtgaatagaagaataattgaataactgcctgagtcacttatacatttctcatctcactctggggacacagaagaccgtgttatactcatctcctcgattttaaaaacagtcattctaaaatcaaggattctagatgtatcacttctaggcgaaatcttgaaagaaaatgtgtaagagtttcatgtgctctttatctctatgatcacaattgaagaaggcaggaggttgagatgctgcatcgccaagatcgtggtgattccattatcattacccttgtaacttgtgagcatccttaccgccagcaatcattattagatatggaatctgatataggagttcatatttactgtatgaatatcttggtgtgggagtgttggctcatgcctgtaatcccagtgctttgggaggcagaggcaggaggctcgcttgaacccaggagttcgagacaagccggaagagcatggcgagaccctcgtctctacaaaaatgtaaaaatcagccaagtgtgctggtaggtgcctgtagtctcagctccttaggaggctgaagtgttaggatcgctttcgcccgggatgtaatggctacagggagtcgagatcttgccactgaacttcagcctgggcaacagagcaagactctctctcaaaaataaaatgctttttcctttaggcttaaattctaacactcaaacctccaaagcggaggtattaggaggtggggcccttgggagatgatgagattatgaaagtggaaccctcgtaaatgggattagtgcccttctgaaagtgacggaagagagctcgccagcaccttccatgtggggagacagggaggatatgacagtctccaacctggaagagggtcctcaccagaccccgatcatgctggcactctcatcgtggacttccggcctccagaactctgatcaacaaatgtgtgttcttaaagaaaaaaaaagtgtggaaagcaatgttaatgttcccaatcactttgagtacattctttccttaactatgtcttaatgcatagttgtgttggatggcctagtttgtaatgttagaatatgcatgttagtgaattaataaatacagcagtaaagaatagagttgtggttgggaatggtgtctcacgcctgtaatcccagcacaatggcatgccgaggcgggtcaatcacctgtagtcgggaggtggagatcaccctgaccaacatggagaaatcccgactctactaaaaatacaaatcagcctgtcatagaggcacatgcctttaatcccagctactcgggaggctgaggcaggagaatcacttgaacctagaaggcagaggttgcggtgagccgagatcgcgccattgcactccagcctgggcaacaaaagctaaattctatagcaaaaaattaaaaaaaaaaaaaagaaggctgtttgttgaccatttgagtggccagtcttggtgcttcctggtgggcgaggagagccctgccccattcctacccattccagtagtcatggcataagagtgattctcactttctgctatagcctccttatccattggctgaaatgattcttttttaatgtgtcttattaatgcttccatagcaaaaaaaattgaattgacttttatagggactctttcggggattgttacccatcattccataatttgtttgtactcctagaaaagggaagtatgccgagcacagtggatatttcgtctcaaataataaataaataaccaaatagaaaagaaagaaaaggaagtaaagggaaatatacaaatatacaaggtgttaggagagagttgctaatcgtgattcccccttaattgtccaaacagaccacctctggggatctattcgtaaaagactcgttagaagtgcagactcatgcatttgagaatcactcagggaaatctgaagatgacctgtggtgggggtgtaaatggatacttaaatgtgtcttgtgattgtgtgagagtgtgactgtgtgtttgtgtgtgtgctgtcatctgtggagtgggggatcctcttttgccttgagaaagctcatctctgtccacttactctgggctctaccatctgtgccttgtatccagtagaaataaaacagtttgcggcagaaatggagttttattttattttactttactttttattaggattatttgtagaccgggtctcactctgtcactcaggcgggagtgcaacggcacgatctcagatcactgcaacctgtgcctcctgcactgaagccatcctcccacctcagcctctggagtggggagatcccacacctgtgtaatttttgcattttttctagagatggggtttcctcatgctgcccgggctggtttccaacgcccgggctcaagtgatccacccgcctcagcctcccaaagtgctgggattacaggtgggagctactgtgcccggccagaaatggagatttttgttcttcttttgatgagacggaacctcgcaccgtggcccaggctggagtgcagtggagtgacctcggctcactgcaagctctgcctcctggggtcatgccattctcctgcctcagcctcccaaagagctgggactacaggcgcccgacaccacgcccagctaaggtttttgcatttttttttttttttttgtagggacgggctttcaccgtgttagccaggacggtctcgatctcctgccctcgtgatgcacccgcctgagcctcccgaagtgctcggattacaggcatgagccaccatgcacggcccagaaatggagatttttgagcaaacacattaaagaaaagaaacgcaaatagacgaaactcattttaacatttttatttaacccaaggaatacagatataatcaacaccaatacaattgatgtcacaatgatgactaagatacatgctacaatccttcattctcagatgcaaaatctagtatgtgttttacagcaaacgtcagttggaaactgaacgtcgatcacacatgcttgatgtgcatgtcaatttcatgagagttacaatctcaggagaagtctcacatagcgtaagagtccaaacataccttcaagtgtttcgacaagttcttcactactcattcttagaactgaatttaccaacaacaatcccagcctattcattgctgaactgcatcccattgaaagaatgggtcacagttcctctctctagacactgtggaacgacattgaaggcccctccatcttttggcgattgtgaggacaggtgctagaagcctctgccctcagccttgtccacgtgagttctaattcctttagaacaactatctcagggtgggaaagatggttccaatgctaagtgcctattgcattgattatgaatcaatgaaactctttctccctgggggttgtcccagttggattccaagcagcactgtcagagtgttccagcttctccacatgctccgcagcccttgggatggtgagtgattgtcacggtggcttctgggagagcttcttggttgttgttgaaggtgtatttgacgtgcatttccccaggggagggacagtgaacgctttttgaagtggttctttacatcccctttgaggaaatgtctgctcaagtctctggctgggttttgaacagaatcatttgtttgtcccattggagttttgacaactctgtgtattctgagtatgagcagtccttgcacgtatatgagatttgcaaatattttgtgccccaatctcaaggttgctctttgatacaaatcaagagcatctgaggcagagcaaaggttcaggtgagaggacggagcatttctccacctctccagcatgcgcagcatctctctcctccgagatgccgagacatgtgtgcagggagacaccatgaaaaagcaggtgtgcttcattctgaatagagcgtctctgattcccgtctggtgcctgagggtccatggcccatgagccttagaagagacgtcttcgggccttgcacgttggcctccatagaaacttgtggcaaattctgggctccggactgggtgatggaggtagaggtctgagagcagaggtgggcaggggctccaggccgtggagatccaagtggaattcttcaggcagagcctgtctccagggactaggcttgggcatttgggatgagccctgggggacggccgctctgtagtcaggtttgaggtagaggacacgccaggaagaagggctgactccatgcacaaggtttgctgggggtcccatcagggtcaggaagccttgcggagcctcaccctcttttactgaaggcgccacacacacattctctgctctctgggctctcacagatccattttcaatgtcaatctcccagacagtctctgtactagtgagcaggagccagcgggcatgggcagggtacaagagatccttcagggacatcaagagttgctcagggaccaccaggagctgcacattgaggaggctgagtcgcagggctccctgtgggtccagccccaggaactcctgccccaggcgcaggtgcaggaccattcctggttccaagaccgcgatgatcatcttcctctggggaagctgtgggccctgggggagaaaagccgtgggtcagtcattgtcctctgagggtggctcaaacagggagagagcaaggcggggagctgccagtaacttccccaggcataaatgaaaccccgcagggacacccagaattggcacctgtattgacgccccttgggacggtgatttcctgcaagtcccctagggcctggagctcaggcagacctgtctcacccacgcccacctaggtggtgtgaccttacctggggcagctccaggggcagttgtgcagggtggtggggagctggctgtaccggagctggttctgcacctgtggagagagcagagtgtgcaggtgaaagcccttgtcatgcaggatgcccttgagggttcaaggtgccaccgtgagaaagaccaaatacagaagaagccaggtacaggacacccagccacggagctgcaggaggaagctcccgacactctggacagcacagctgctcgcctcatgacgtgacgggacactggcttggtagcaggggactcaggatgaaaaagagaagatgcctcacctggatgaggacccagctcctccactttctggcgttttggggcatttgatggcgtgccgctggagctgtaggacagagagagagacacagtcagatttcgggcagttccctaacgtccaattccctgaatccccacaaattcactccacttccctgcctttcattcaaggccacagactcgtcatccacttcctgtgagacctgctcccaatctgtcctaactcccagctgttcttgttctcaccccatctacctgagcttccctgggtgaagaaaaggcagggaaggagggtcggtgcccacagggagcagtttaccctttcaggagctcatgcagatgagagttggaaaactctccttgggtgtgaggagctggagaaagatgttgagatcccggagaggtggcacctctgtctacacaggtaacaaaggaatggggtcttaggattcgaatcacagcaggagaagaggaaggaatttgtcgggcatgacggcatgcgcctgtaatcccagcactttgggaggccaaggtcggaggattgcttgagtccaggagtttgagagcagcctgggcaacatggtgaaagctagtctccactaaaaatactaaacattagtgggtcatggtggtgcatgcctgtggtctcacctactcaggaggctcaggtgggaggatcacctgcgactcagaggtggagcccgcagtcagctaaaatcacgccactgcactccagtgtggaccatcggagtgagacgctgtctcagtaaaataaatcagtaaataagacaaatagaaaaattaaaaatgaaaaaaggaggaaactgttttatttttcctagtagatcttgaaactctcacatcatgtcctacaatctcccttcttgcagaacacagaacccattccctgtggagctggttgggtggattgaaagtggggctgccctgagatatgtgtgtggttgcgatgtagaagccttcccagcaccctgtgatgacttacgggcacctcacttccctctggccccaaattcaaaacatccaatctcatggcaggttcatgcacccttttcccttcccctctctccaacacacacccacacatcccacaggcaggtcaccccgcaggcgtccccagcacatagcaaagctcacccgctctctcctgcgtggtcgctcttggattcggtgcaggaatcactggggcttcttgggcgccgggaacctttcatggtgaaaatttccagggttctccaagtcagccactgccagtgtttgtctgtctcctgcaaagatttcttcttggctcccgaatcctttagttcctttgagagagtggtgtcagccccaaagctgctcccgaaggcttgggttgtgtagcgacggggctgtggccagcggcaggtggatgaggctctgacaactgagctcttgggggaatcttgtacactgtcagcagggggtggagccaggggatttgtcagcaggaactgatgtgattggctgttcctggtatgacaacgggaggggccctcatggaggattggggcgtaactcaatccatagatgaccgatcaacagaacctgcctaatcccatcaagagtcaacctgtttcctgtcccctcccatcctctaggtcttgcctaataatgatagacactttctgtaatacccaattcatccatcgctgaaatagtttttcatgtgtgccttttatattttcatgcaataaaaatatgttaactttcacggtggctatcctggggaatgttatgtacacgaaatgaagtgtcaaaggagcagaagcagaaggaaattcacaagcttccctgagagtctctgcttgaattcctgccatgtttcctaaatatgttggcttcctacttcctacccaagtaagaaggtgcttcagaagatcaatcttaggacatttgacaaacgctactgagaatttcaggatgacaggaaggaacctttgattggatttgtggatgtgcctgtgaaagcgtgtgtgtgtgtgtgtgtgtgtgtgtgtgtgtgcgtgtgaagccaggatgaagtggctgttcctggggtggagacccttctttctcttgagaatgtccattgctgttgactcattgtgggttttggagatattttctctctttctttcgttctttctgacattttttgctttctccctccctcgatcctaaccccactccatccccccctcctcactccctccctccctctttccatccttcctccctcccttccctctttccttccttcctgccttcttcctttccccttcccctcttccttccgtccttccttcctgtgtgtaaaagaaaaattggtgaatagaagaataattgaataactgcctgagtcacttatacatttctcatctcactctggggacacagaagaccgtgttgtactcatctcctcgattttaaaaacagtcattctaaaatcaaggattctagatgtatcacttctaggcgaaatcttgaaagagaatgtgtaagagtttcatgtgctcttcatctctgtgatcacaattgaagaaggcatgagtttgagacgctgcatcaccaagatcgtggtgattccattgtcattacccttgtaacttgtgagcatccttactgccagcaatcattattagatatggaatctgatataggagttcatatttgctgtatgaatatcttgttctgggagtggtggctcatgcctgtcatcccagtgctttgggaggcagaggcaggaggctcgcttgagcccaggagttcgagacaagccgggacagcatagccagaccctcgtctctacaaaaatgtaaaaatcagccaagtgtgctggtaggtgcctgtaatctcagctacttaggaggctgaagtgttaggatcgcttgcgcccgggatgtcaaggctacagggagccgagatcgtgccactgaacttcagtctgggcaacagagcaagactctctctcaaaaataaaatactttttcctttaggcttaaattctaacactcaaacctccaatgtggcggtattaggaggtggggcccttgggagataatgagattatgaaagtggaaccctcgtaaatgggattagtgcccctctgaaagtgaccgaagagagctcgccagcaccttccatgtggggagacagggaggatatgacagtctccaacctggaagagggtcctcaccagaccccgatcatgctggcaccctcatcttcgacttccggcctccagaactctgatcaacaaatgtgtattcttaaagaaaaaaaaagtgtggaaagcaatgttaatgttcccaatcactttgagtacattctttccttaactatgtcttaatgcatagttgtcttggatggcctagtttgtaatattagtatatgcatatcagtgaattaataaatacagcagtgaagaatactgttctcgttggcaatggtggctctcgcctgtaatcccagcacaatgggtgggcaagtcgtgtcaatcatctgaagtcgggggttggagatcatcctgaccaacatggagaaatcccgactctactaaaaataccaatctgcctgtcatagtggcacgtgtctttaatcccagctacttcggaggctgaggcaggggaatcacttgaacctaggaggtagaggttgtggtgagctgagatcgtgtgcgtgcagtctatcctaggcaacaaaagctaaactctatctgaataaagaaaaaaaaaatgtaatggtgtttgttgaccatttgttcagctagtcttggtgcttccttgtgggccaggagagccctgctgcagcccccattcattccagtagacatggcagaagagtgattctcactttctgctatagcctcttcatccattggttgaaatgatttttttatatgtcttataaatgtttccacattaaaaaacgaattgaattttatagtgacgcttttggggattgttacccataatttgtttgaactcctaaaacatggaagtatgccaagcacagtggcttatgcctgtaatcccagcgctttgggtgggcggatgacctgatgtcaggagttcacgaccagcctgaccaatgtgggagaaatcctaactctactaaaaatacaaaaattagccgacgatggtggtgtgtacctgtattcccagctacttgggaggctgagacaggaaaattgcttgaacccaagaggcaaaagttgcagtgagctgagatggtgccatttcactccagactgtatgacagagggagattccatcttaaaaaaataaaaaaaggaattaaagggaaatatataagatgttgtgagagagtttctaattgtgattcctccataattgtccaaacagaccacctctgggggtctattcacaagagactctttagaagtggaaactcatgcatttgggaaacgctgggggaaatctgaagatgacctatggtgggggtataaatggattcgtacgtgtgttttttgattgtgtgagtgtgtgtgtgtgtgtgtgtgctgtcatctgtggagtgggggatcctcttttgccttgagaaagctcatctctgtccacttactctgggctctaccatctgtgccttgtatccagtagaaataaaacagtttgcggcagaaatggagttttattttattttactttactttttattaggattatttgtagaccgggtctcactctgtcactcaggctggagtgcaatggcacgatctcagatcactgcaacctgtgcctcctgcactgaagccatcctcccacctcagcctctggagtggggagatcccacacctgtgtaatttttgcatttgttctagagatggggtttcctcatgctgcccgggctggtctccaactcccgggctcaagcgatccacccgcttcagcctcctaaagtgctgggattacaggtgtgagctactgtgcgtggccagaaatggagattttcttttttttctccttttttttttttgaggcggagtcttgcactgttgcccaggctggagtgcagtggagtgacattggcgccctgcaagctctgcctcctcggttcacgccattctcctgaggggagggagggagggagggaaagaagaaagggagggagggaggaagggaggagaaaatgtccgaaggaaagaaagaaagaaagaaagagaaagaaagaaggaaagaaagaaagaaagagagagagaaaatgttcacaaaacccacaatgagttaccagcaatgaactttctccagacaaagaagggtctgcaccccaggaacagacacttcttcctggctacacacacacacacacacacacacacacacacacacacacacacacacacacgctttcataggcaatccagatatccagtcaaagattccttatttatttccctttacttcctttttttttttttttttgagacaaaatctccctctgtcttcgaggctggagtgcagtggcaccatctcagctcactgcaacttctgcctcctgggttcaagcaattgtcttgtctcagcctcccaagtagctgggactacaggtgcacaccaccatggttggctaatttttatatttttagtagagttggggttttcccacattggtcaggctggtcttgaactcctgacatcaggtgatccgcccgcctcagcctcccaaagtgctgggattacaagcatgagccactgtgctcggcatacttccattttttaggagttcaaacaaattatgggtaatgatccccaaaagagtcactataaaattcaattctttttttactatggaaacatttataagacactttaaaaaaatcatttcagccaatggataaagaggctatagcagagagtgagaatcactcttatgccatgtctactggaatgggttgggggtggggcagcgctctcctggctcaccaggaagcaccaagtctagctgatcaaatggtcaacaaacagcattctttttttttttttttttaattttttgagattcagtttagcgtttgttgcccaggctggagtgcaatggcgcgatctcggctcaccacaacctctgcctcccaggttcaagtgattctcctgcctcagcctcccgagcagtgggattaaaggcatgtgccactatggcagactgatttgtatttttagtagagtcgggatttctccatgttggtcaggctgatctccaactcccgactacaggtgattgaccagccttggccttccattgtgctgggattacaggcgtgagccaccattcccaacctgaacagtattctttattgctgtatttattaattcactaacatgcatattctaacattacaaactaggccatacaacacaactatgcattaagacatagttaaagaaagaatgtactcaaagtgattgggaacattaacactgctttccacgctttttttttttttaagaacagacatttgtttatcccagttctggaggctggaagtccaagatgagggtgccagcatgatcggggtctggtgaggaccctcttccaggttggagactgtcatatcctccctgtctcctcacatggaaggtgccggcgagctctcttctgtcactttcagaagggcactaatcccatctatgagggctccaccttcataacgtcatcatctccaaaaggccccagctcctaataccttcacattggaggtttgagggttagaatttaagcctaaagaataaaacattttatttttgagacagtcttgctctgttgcccaggctgaagttcagtggcacgatcttggctctctgtagccttgacatcccaggctcaagggatcctcccacttcagcctcccaaatagctgagactacaggcacctaccaccacacttggctgatttttaaattttttgttgagatggggtctcgctaaattgtcctggctggtctcgaactcttgggctcttgggctcaagtgagcctcctgcctctgcctcccaaagcactgggattacaggcatgagccaccactcccagaccaagatattcataccgtaaatatgaactcctatctcacatttgatatctaataatgattgctggcagtaaggatgctcacaagttacaagggtaatgataatggaatcaccacgatcttggtgatgcagcatctcaaactcatgccttcttcaattgtgatcacagagatgaagagcacatgaaactcttacacgttttctttcacgatttggcctagaagtgatacatctagtctccttgattttagaatgactgtttttaaaatcaaggagatgagtccaacacggtcttccgtgtgcccagaatgagttgagaactgtataaatgtctgaggcagttattcaattattcttctattcaccatttttttttgacacagtctcactctggcacccaggctggagtgcagtggtaaaatcttgactctctgccacctccacgtcccagcctcaagcgattctcgtgcctcagccacccaagtaactgggattacaggcgtgctccaccacacccagctaatttttgtatttttagtagagacgcggtttcgccaagttgcccaggctcgttttgaactcctgagctcagacgatctgtctgcctgggcctcccaaagtgctggaattacaggtgtgagccactgcgccaggcctgtttttgtaattttttttagagacaaggtctcactttgtggcccttactgctctgcatagtggttgaactaagcaacacagtacaagcgttctcttttctccacatccttaccagcatgtattattgtctgtcttttggatgtaagctaactggggtaaggtgatatctcctcatagttttgacttgcatttctctgatgatcaatgatgttgagcaccttttcataagcctgtttaccatttgtatatcttcttttgaaaaacgtctattcagaggccaggcgtggtgtctcatgcctgtaatcccagcactttgggaagccaaggtgggcggatcttctgaggtcaggagtttgagaccagcctggccaacgtgatgaaaccctgtgtctactaaaagtacaaaaactagctgggcgtggtggcggatgcctgtaatcccatctacttgggaggctgaggcaggagaatcgcttgtacctgggaggcggaggttgcagtgagctgagatcgtgccattgctctccagtctgggtgacagagtgagactctgtctaaaaataaaaaaataaaaaaataatctattcctgtcttttgcccattttcaaaatcaaattattagattttgtcctattgggtcaagcactgtgtctcacgcctgtaatgccagcactttggggggatgaggtgggaggattacctggggtcgggcgttcgagaccaggctggctaatatggtgaaatcctgtatctactaaaaatacacagattagtcaggcgtggtggcaggcacctgtactgccagctcctcaggaggctgaggccggagaattgcttgaacctgagaggtggaggttggggtgagctgagattgttccactgcactccagactgggcaatagactctgtctcagaaaaaaaaaaaaaaaggttgtgtgctattgagatgtttgagctccttttgtattttgaatcaatttctatattttacttatcacctgatagacacgctaaatgtgcatattttgatcaaatatctaagttgcacatgatttagtttctgttttcttcttgcttcctcagagttttgttagctttataatgtttaaatattagcttgatgatatattaatatttctaatatattgaggagttttcctaattcaaaagttagtcgagcaaaattctcttacgcatgtataatctattgttcacaggcctctaattaaatcgtcattgttaaactgttttgaaattctatctttatcacacattaggttttcaggagagaaatggttctaaaaacaaatgttcctccatcgatttactgtttttttttttttttttgagacggagtttcactctagttgcccaggctggagtgcagtggcgcgatctcggctcactgcaacctgcgcctcctgggttcaagcgattctcctgcctcagcctcccgagtagctgggattacaggtatgagccaccgtgcccaaccatctcaggtttttctgagcttggatccagtgtgttactttctagtgtcccgcacactacagtcccttccctgggatatgtggtgacccttccaagtcctcattattttcaacaaacttccttctcagctgtctcctttgtgaggcttttgggtctgtctgcttcttgcctaacccaatatcccctagccccaggcagatgctggtagtttgtgtctttcaatccttcagtagacactatccttgcctggaaagtcatgctagagttaactttaaaactaattgttacattactagccaggcatggcagctcacacctgtaatcccagcactttgggaggtcaaggcaggcagatcacttgaggccaccaggagttcgagaccagcctgaccagcatagtgaaacctcatctctactaaaaatacaaaaattagccgggtgtggtggcacacacctgtaatcccagctacttgggaagctgaggcaggtgaatcacttgaacctgggaggtggaggttgcagtgaaccgagatcatgccactgcactgtggcctgagtgacaagagtgagactctgtctcaaaaaacaaaaacaaaaacaaaaaaccaaaaagagatctatgttctatttgagataatggaaaaagggattttactgaccacacacaacaaggaatatagtctttctaaaaatagttggaaaagtcactgaacaaatggaaaaggggagcccaaagcaagccacaacaacaaaacctggggaagggggagaatccccctacaaatactttaacacaactatcttaaatatgttcaaagagctaagcaggcatgtccaagggagagaacatagtcatgtgtttttgtttctgtttctggttgggccagtaaagccccatcctcatccctcttttctgcttatcactagagacagaaactagaaaccatggattcaggctgctaaaagccaaaaacgaaagagaacaccatcaccaaaataaggcaggtcagacaagcttgaaagaaaacccttgacaaagatgtctcaatgacagagcaggtgcattgccatcttggacaaacaccactattttaagttccctttgattaaaaatcgcctaaatccagcccctaaaacatgagtctaatggctaatctcagcttgaccataaaccataaatgacacctttgaccagaaacattccaatgctgagataaactctcctccactcagaaaacattctgaacctgtgataagctctccctcactaaacttttctttttgagatggaatcttgctctgctgcccaggctggagtgcagtggcgtgatctcgcatcactgcaacctccgcttcccaggttcaagcgattctcctgcctcagcctcctgagtagatgggattacaggcacgtgccaccatgcctggctaatttttctatgtttatttttatttatttatttaattattattattttttcaaataaatttttttattattatactttaagttttagggtacatgtgcacaatgtgcaggttagttacatatgtgtacatgtgccatgctggtgtgctgcacccattaactcgtcatttagcattaggtatatctcctaatgctatccctccccactccccccatcccgcaacagtccccagagtgtgatattccccttcctgtgtccatgtgttctcattgttcaattcccatctatgagtgagaacatgcggtgtttggttttttgtccttgtgatagtttactgagaatgatgatttccaatttcatccatgtccctacaaaggacatgaactcatcattttttatggctgcatagtattccatggtgtatatgtgccacattttcttaatccagtctatcattgttggacatttgggttggttccaagtctttgctattgtgaatagtgccccaataaacatacgtgtgcatgtgtctttatagcagcatgatttatagtcctttgggtatatactcagtaatgggatggctgggtcaaatggtatttctagttctagatccctgaggaactgccacactgacttccacaatggttgaactagtttacagtcccaccaacagtgtgaaagtgttcctatttctccacatcctctccagcacctgttgtttcctgactttttaatgattgccattctaactagtgtgagatggtatctcattgtggttttgatttgcatttctctgatagccagtgatggtgagcattttttcatgtgttttttggctgcataaatgtcttcttttgagaagtgtctgttcatgtccttctcccactttttgttggggttgtttgctttttccttgtaaatgtgtttgagttcattgtagattctggatattagccctttgtcagatgagtaggttgtgaaaattttctcccattttataggttgcctgttcactccaatggtagtttcttttgctgtgcagaagctctttagtttaattagatcccatttgtcaattttggcttttgttgccattgcttttggtgttttagacatgaagtccttgctcatgcctatgtcctaaatggtaatgcctaggttttcttctagggtttttatggttttaggtctaacgtttaagtctttaatccatcttgaattaatttttgtataaggtgtaaggaagggatccagtttcagctttctacatatggctagccagttttcccagcaccatttattaaacagggaatcctttccccattgcttgtttttctcagatttgtcaaagatcagatagttgtagatatgtggtgttatttctgagggctctgttctgttccattgatctatatctctgttttggtaccagtaccatgctgttttggttgctgtagccttgtagtatagtttgaagtcaggtagcatgatgcctccagctttgttcttttggcttaggattgacttggcgatgtgggctcttttttggttccatgtgaactttaaagtagttttttccaattttgtgaagaaagtcatcagtatcttgatggggatggcattgaatctataaattaccctgggcagtatggccattttcacgatattgattcttcctacccatgagcatggaatgttcttccatttgtttgtatcctcttttatttcattgagcagtggtttgtagttctccttgaagaggtccttcacgtcccttgtaagttgcattcctaggtattttattctctttgaagcaattatgaatgggagttcacttatgatttggctctgtgtttgtctgttattggtgtataagaatgcttgtgatttttgtacattgattttgtatcctgagactttgctgaagttgcttatcagcttaaggagattttgggctgagacaatggggttttctagatatacaatcatgtcgtctgcaaacagggacaatttgacttcctgttttcctaactgaataccctttatttccttctcctgcctaattgccctggccagaacttccaacactatgttgaataggagtggtgagagagggcatccctgtcttgtgccagttttcaaagggaatgtttccagtttttgcccattcagtatgatattggctgtgggtttgtcatagatagctcttagtattttgagatatgtcccatcaatacctaatttattgagagtttttagcatgaagggttgttgaattttgtcaaaggccttttctgcatctattgagataatcatgtggtttttgtctttggttctgtttatatgctggattacatttattgatttgtgtatattgaaccagccttgcatcccagggatgaagcccacttgatcatggtggataagctttttgatgtgctgctggattcggtttgccagtattttattgaggattttcgcatcaatgttcatcaaggatattggtctaaaattctcttttttggttgtgtctctgcccggctttggtatcaggatgatgctggcctcataaaacgagttagggaggattccctctttttctattgattggaatagtttcagaaggaatggtaccagttcctccttgtacctctggtagaattcggctgtgaatccatctggtcctggaatctttttggttggtaagctattgattattgccacagtttcagctcctgttattggtctattcagagattcaacttcttcctggtttagtcttgggagagtgtatgtgtcgaggaatttatccatttcttctagattttctagtttatttgcatagaggtgtttgtagtattctctcatggtagtttgtatttctgtgggatcggtggtgatatcccctttatcattttttattgtgtctatttgattcttctctctttttttctttattagtcttgctagtggtctatcaattttgttgatcctttcaaaaaaccagctcctggattcactaattttttgaagggtttttttggtctctatttccttcagttctgatctgattttagttatttcttgccttctgctagcttttgaatgtgtttgctcttgcttttctagttcttttaattgtgatgttagggtgtccattttggatctttcctgctttctcttgtgggcatttagtgctataaatttccctctacacactgctttgaatgtgtcccagagattctggtatattgtgtctttgttctcattggtttcaaagaacatctttatttctgccttcatttcattatgtacccagtagtcattcaggagcaggttgttcagtttccatgtagttgagcagttttgagtgggtttcttaatcctgagttctagtttgattgcactgtggtctgagagacagtttgttataatttctgttcttttacatttgctgaggagagctttacttccaactatgtggtcaattttggaataggtgttgtgtggtgctgaaaaaaatgtacattctgttgatttggggtggagagttctgtagatgtctattaggtctgcttggtgtagagctgagttcaattcctgggtatccttgttaactttctgtctcattgatctgtctaatgttgacagtggggtgttaaagtctcccattattattgtgtgggagtctaagtctttttgtaggtcactcaggacttgctttatgaatctgggtgctcctgtattgggggcatatatatttaggatagttagctcttcttgttgaattgatccctttaccattatgtaatggccttctttgtctctttcgatctttgttggtttaaagtctgttttatcagagactaggattacaacccctgcctttttttgttttccatttgcttggtagatcttcctccatccttttattttgagcctatgtgtgtctctgcacgtgagatgggtttcctgaatacagcacactgatgggtcttgactctttatccaatttgccagtctgtgtcttttaattggagcatttagtccatttacatttaaagttaatattgttatatgtgaatttgatcctgtcattatgatgttagctggttattttgctcgttagttgatgcagtttcttcctagtcttgatggtctttacattttggcatgattttgcaggggctggttccagttgttcctttccacgtttagtgcttccttcagggacttttttagggcaggcctggtggtgacaaaatctctcagcatttgcttgcttgtaaagtattttatttctccttcacttatgaagtttagtttggctggatatgaaattctgggttgaaaattcttttctttaagaatgttgaatattggcccccactctcttctggcttgtagagtttctgctgagagatccgctgttagtctgatgggcttccctttgtgagtaacccgacctttctctctggctgcccttaacattttttccttcatttcaactttggtcaatctgacaattatgtgtcttggagttgctcttcttgaggaatatctttgtggcattctctgcatttcctgaatctgaatgttggcctgccttgctagattggggaagttctcctggataatatcctgcagagtgttttccaacttggttccattctccctgtcactttcaggtacactgatcagatgcagatttggtcttttcacatagtcccatatttcttggaggctttgttcatttctttttattcttttttctctaaacttcccttctcacttcatttcattcatttcatcttccatcactgctaccctttcttccagttgattgcatcggctcctgaggcttctgcattcttcacgtagttcttgagccttggctttcaactccatcagctcctttaagcacttctctgtattggttattctagttatacattcgtctaaatttttttcaaagttttcaacttctttgcctttggtttgaatttcctcctgtagctcggagtagtttgatcgtctgaagacttcttctctcaactcgtcaaagtcattctccgtccagctttgttccgttgctggtgacgaactgcattcctttggaggagaggcgctctgctttttagagtttcagtttttctgctctgttttttccccatctttgtggttttatctacttttggtctttgatgatggtgatgtgcagatgggtttttggtgtggatgtcctttctgtttgttagttttccttctaacagacaggaccctcagctgcaggtctgttggagtttgctcgaggtccactccagaccctgtttgcctgggtatcagcagccgtgtctgcagaaccgcggattttcatgaaccacgaatgctgctgtctgatcgttcctctggaagttttgtctcagataagtacccggccgtgtgaggtgtcagtctgcccctactggggggtgcctcccagttaggctgctcaggggtcaggggtcagggacccacttgaggaggcagtctgcctgttctcagatctccagctgcatgctgggagaaccactgctccttcagagctgtcagacagggacatttaagtctgcagaggttactgctgtctttttgtttgtctgtgccctgcccccagaggtggagcctacagaggcaggcaggcctacttgagctgtggtgggctccacccagttcgagcttcctggctgctttgtttacctaagtgagcctgagcaatgcgggcacccttcccccagcctcgctgctgccttgcagtttaatctcagactgctgtgctagcaatcagcaagactccatgggcataggaccctccgagccaggtgcgggatacaatctcctggtgtgccgtttcctaagcccatcggaaaagcgcagtatttgggtgggagtgacccaattttccaggtgctgtctgtcaccctttccttgaccaggaaagggaactccctgaccccttgcacttcccgagtgaggcaatgccttgccctgcttcagctcgcacacggcgcactgcacccactgtcctgcgcccactgtctggcactccctagtgagatgcacccagtacctcagatggaaatgcagaaatcacccatcttctgtgtcgctcactctgggagctgtagactggagctgttcctatttggccatcttggctcctccctcctaatttttctatttttagtagagacagggtttcaccatgttggtcaggctagtctcgaactcctgacctcgtgattcacctgcctcggcctcccaaagtgctgggattacaggcatgagccaccgtgcccagcccctaaactcttaaatagttttagtctgtaagagagaatactcctgacctaaattggccagaagcccctctcaggtttattcccaaaataaacctgtctttgactgttgagctgcttttcctgtttctttcttcaactcttacactcaacatatagagaacatcaagagtatcaataaagagatagaaattacgaaaaggaactgaatagaacttgaaccatatccctgtattttccctgtccaactccccctaagcaaccactaatctactttccatctgtatagatttatctatttttgacatttcatagaaatggaattacatatagttggtcttttgtgagtagcgtctttcccttagcacaaggttttcattcatgtagacacatccttcccacctctgtggctgaataatacacaatgtatgaatatatcacattaaaaacactcatttataaattgatgggcatttgggttgttctggtccattttttgctggtccaagcttcaccttcagatcagttacctgtcttttttttttttttttttttttttgagacaggatcttgctccacagaacaaatcacagctcaatgcagccttgacttcctgggctcaagcaatctcctgcctcagctttttgagtagctgaaactacaggcacatgccaccatgcccagctaatttttttttggtagagatggggtcttactatgttgcccaggcttgtcttgaactcctgatctcaagtgatcctcctgccttggcctcccaaagcactggccttaaggtgtgagctacagttcccatcctattattaaatattttcaaacagggagataatttgaaataattttacaagtgagcatccacttatagactgaattgtccccatcccctcaccccccaaattaatatgctggagccctaaccccagtacctcagaatgggactctatgtgtaagatcaggcttttttttttttttttttttttttttttttttttttgagatggagtctcactctgtcaccaggctggagtgcagtggtgcgatcttagctcactgcaacctccgcctcccaggttcaagcgatctcctgccttagcctctgagtagctgtgactacaggaacgtgccaccatccccaggtaatttttgtatttttagtacagacagggtttcaccatgttggccaggatggtctcaatctcttgacctcatgatccgcccacgttggcctcccaaagtgctgggattacaggcatgaaccaccgtacccggccaagatcaggcttttaaagaggcaattaagtaagttaaaatgaggcttttagggtgtgccctaatccagtttggctggtgtttttataaggaaattaggacataatagaccaagaagcattgtggtgcacagacagaaggggcagcaagggggtagccatctgcaagccatgcagagacctcaggagaaaccaaccttgccagccccttgatcttggacttccagcctccaggactgtgggaaaataaatttctactttttatttatttattttctttgaaatggagtctcactctgttgcccaggctggagtgcaatggtgcgatcttggcttaccgcaacttctgcctcccaggttcaagtgattctcttgcctcagactcccaagtaggtgggactacaggcatgcaccaccatgcccacacgatttttgtatttttagtaaagacggggttttgctatgttggccacgctggtctagaactcctgacctcaaatgatccaccaccctcggcctcccaaagtgctggattacaggtgtgagccactgggcctggcccaaatttctacttttcaccagcaagtctgtggtattttatagtagccctaccaaactaatataatctaccatctagattccatcagtgatactttattatacttgcctgaccacattgatctctgtatcattcatcaacccatctttatttttattttttttttgcattttgaagtagtttgcagacagcaatagatttctcccctaaacatttttaacatacatatcattaattagagttcaaaatttggggctggaagatctctttccaaggtggctcatcttctgcctagcaatgtggtgctggaaagttggtcctttgccacggcgctgcttgagtgtcctcatggcatggtggatggctttctccagggagggagcaattgaagaaaccgaggaagcttcagtgtgtcttatgacctggcctgagatgccacacatggtcacttcagcagcagcactgtattgattatatgggtcatctgattaaatattggggtgtgtgtggggtgctacacaggacaggaatctcaggtggcaaggatccttggtgagcatcttgaaggctagcgaacacatccacctttcctccagaccacctcatcagcccagaaatccccaccccctgttatcttttttttctgctgtagagcctggtttcattgtagctgtctggggcctctggcatttttatggctgtgtttgggataagttgcaaggtttcctttcccctttctcccctctctgttcttctcagcctcacccccagcttcacccttccttttcctctcagggcctttctgagcagttgatgctctgagggtcagctgggaatgcagcctataagagcggtctgctgggtgcagaaaatgttgggggaaggtttgcttcctgggctcctgtcacctcctgtattatgggagcttgggggcatatgctggcatgttgggactactgttgtcttccatgttctaacattccctgggaaaggagacacttggtttgatggggctctacgtatctgctatcaggtggggacagacatctgcattgcaagagcaagctgaagagttgcctactagggctcagctggtttcttgtgtttggaataaagagggctcactgaaggggcagtcatcttatgttagggaagacttgagggactcacactgtgggctctcctcatttatgttgagagtgttgcttcctgatgcttctgtcaactcttattttgtaataatcgaatgagaggtagaacctggcgggttgcctgttgagattctcatgattgtattgggggaaggctgtggtatccttgctggggatatttgtgtctgctcttggggagacaagggaggcaagctagggtttgtgttgagtgagagtgttgtggaatttggagctttctttagtatgtaggggattggaaattgcctttttgggtttccttcatctaatgttagaggaatataggggggtcacttgaagttctcatctgatggaatcctcattgtgttgaggggtgtaactaagaggctggaggtacgagctcctgttttttagggcctggaggatcactacctttgactcccattttttaaatattggggagtcagggaagtgtacctggatggaggtcccattgtcttagtttgggaagaagatgggttgttattctgtgggggtccacttatctctgtccagtgggtttggaagggtctcttttaacctattttatctagtgttgagggggttactagagtcactttctgggtcttccttattattggtatagatgaggtaggtcactgggcttgggatcctcattctttagtgctgaggggcagctgaggaagtcacttgtgggattgctgtcatttcaagtatcagacataactggaggtgcttattgaaatttccatcagttctagttttgggaggatggatgtcttgctttctcagtatcttttgtgtttggggatgacacctgctaactgaggtcttgttgcctctagttttggaggggcctgatgaccccttactaggacttctatcatctctattgttggatgcagactatacgcaccacttgttgggccttccataatcactagtcttgtgtgtttgtgtgtgttgggggagaaatctcctgcagtgctttccaccacctctagtttggggagatcaatgcaatgtgtttttaaaagcattttattttggaaagtttagatatacataaaagttgtaaaactatacagggttgttttatacagtcagtactgatttatatttacttgcatcttatgtttcctgttgatcttaattcctggaattatgtatgtctctatggaatcattttcctgaagcctgaagaaatctcttcagtgtttctgaaaatacggttatgctgttaattctctcagcttaaaaaaatccctcccaggccgggcgtggtggctcacgcctgtaatcccagcactttgggagaccgaggtgggcaaatcatgtgaggtcaaaggatcgagaccatcctggccaacatggtgaaaccctgtctccactaaaaatacaaaaattagctgggcgtggtagcacacacctgtagtcccagctactcaggaggctgaggcaggagaatcacttgaacccaggaggaggaggttgcagtgagccgagatcatgccactgcactccagcatggcgacagagtgagactccatctcaaaaaaaaaaaaaaaaatattccctcccattggaaaacattgttgccttcagttttgaagaatattttcttaggttacagaacttttgattgacaatttccccctcctccaacccatttaaccctttatatgtcagatgtcattcattgtcttcttgcttccatagtttcttttgaaaagtcatcattagtcttactgatgctgctttgaaagcaatgtgtccttcttctttggttgtttggtagatttgcagtttgtctctcattttctatggtttgtccatgtttcctccatttcccttaacatattattcttggttattttaaagtctttgtctgctaactccaatacccaaattgtctctggatctgctattgatttatatattcataaatggggatattttcctgtctcaatggatgaaggagagtgaggtctgaccctggctatttcctgcaggaggacctggggctggatgctatcgctgactgacctctctcagctcctggaatgcagccctctcctctcgtctccagattcagttgctccctcccttcgtcccttcaggctgtgaggtgttagagctctgccctgctaagctgctgggtgctttacaactttttgtggtttccctggatcctgtccacaggactgagtagaccctttatgaaaactctacttgaattgtcctagtctgtgggtgtcaacctgagttcctgctgggaccctgactgatgtgccaactcactgaaataaggaaaagtcctaacaatgtctcagaaaacccaacaagatcaggatctaccatgtctctgaccacatcatcttttactgctccctcatcacccctttgttccactccagctgtattggcctccttgttgtgggcctttgcatgccaacactactcttgcaagacaaattcatatgactcactgtcccaacttgttgagatctccgctcaaatgctccttaccaagaggctttcttttcctagttatataaaattattattcccaaccccccttaactctcctaaaatgcttttttttcctataactctataataccatattttcttgatttttctataatctgttcctcctccattaggtgaagtatttcaatggcaaaactttgcctggcacacagaacatactccgttaatagggtagtggttaagtgcatggactgtctgggttcagatcttggctctaccatttaccagtcagtgaatgcaggcaagtaacttaagtgtatcataccagttttctcatctgtaaactggggataataacattacatacttaagtttataatgcatactgagttaatacttatatgtcatttagaagggggcctgatctatgggaagtgcaatataaatgtctgaccatcaggagttcgagactagcctggccaacatggtgaaaccccatctctactaaaaatataaaaaaattacctgggcgtggtggcaggtgcctgtaatcccagctactcaggaggctgaggcaggagaattgctggaacctgggaggccaaggttgcagtgagccgagatcgcaccattgcactccacccttgatgacaagagtgaaactccatctaaaataaataaataaataaataaatgtttgaccatttattattaatgcattacaatactttgctatgtaaaaatatcatctccacataaaaaggaatacagaatacctaatcctgtatgcatctagttacataatgtcaaaatatataaaaatgacaaaattacagtgttaatacataaacataatggaagagtttaccacacctctatcactaaataaggttagaaaaagaaatctgaacatacgtactgtacttggaaatacaattaagttgcattaatgttcatataccctatatccaaatattagagaatatacattgttttcaaagaaacaacatgggtaaaacttgaccaatttataggtttaccagttagattctgcatcctgctggaagttaacagaacaccacctcaaaaacaaacaacagatcatgttggcttcaatcagttaggggtttctttttttaaaaatatttatttgtttattttgagatggagtctcgctctgttgccaggctggagtgcactggcgccatcttggctcactgcaacctctacctcccaggttcaggcaattctcctgtctcagtttcccgagtagctgggaatacaggtgtgcaccaccacacccagctaatctttatacttttagtagagatagggtttcaccacgttggccaggatggtctcaatctgttgacctcatgatccacccacctcagcctctcaaaagtgctgggattaaaggcgtgagccaccacacccagcctaggggtttcttttagtcacataagaagtataagaataaggagtccagagcagatgcagccaatcggaggctcctggagagcccaaagcattgtgatttttggctgcactttggtttctgtcattgtggtcaaaaagaagctcttcaaactctagaccttgaggccactttccaagagacagaatgggtgaggtgaatggaaaatatgtgaggagaacaagccaggagatgttccacacagtgacttcgacttacttctcattgccaggggagtgcgaaaaaacccgcctgggcttcaggaaaaactataagattgagaactttcgatattgttcacagacaacttgaacaacatgtttgtttctttaaacgaataaactgaagagaacggacactgggaaagaaaccaacagtatttggcataccaagatagagagaaaataatcagtatcataaagctcatgtactctgccaaaaataccactacattagaaaaatgtgtttataaatactaatttccattatgataaactgaatcactcagaaggtatttggaaataactttttgaatatgcaatgtgtggatgtctttaacaagcaaattaattataataaatacattgcattaaaattatgaaatatgttaatgtttattttagggaacagctatacacaaatgtttatattaaaagaaaaaaagactaaaaaaattaatgagccagcagtccaatctacagatgagacactgataaaggatatcccacactcaaaacagtgattatactttttgttcccagtgaaaattgtggccactcagtgaagagttcaggctgaggcatcctaacactgattacattcctaggggtttctccatataagttctctcatatacaagaaagagaagaatcactgaaaaattttccaatattaatatactcataggttttgcatccagggagaagttccatattttccctaacacagaggcatcactgaaggctttctcttcttctttatatttcaagtttctctgtagtgtgaatgctcacaagtttcctaacaaatgtagaaaaacagaaagctctccaatattgatgatgttcaatggggcattctctccagaattaattctcaagtcccttaaaaaccgatagaacattcaaggctttcccatagtcactgcagaataccacactatagtttgctcagtaatgtgaacacttttgctgtagggtattccgcatttctgagtgttgttccattgtgtgatttccagtgcgtcttaagggatgactgtcactgaagccttctgagaccttcacaggttttctcccttagtgtgagctgtcacatgaatccctgctgatagcactgaaggctttctacagctgttccattcttcaggattctctcagtacataatcttctgggcccatgaaggtgagaattcgagctgagagctttaccatacagattgtcctcaaaaggtttctcttcagagtgaattaataggagttactgaatgctatttcatattgattagagtagaaggatgatgtgctgagggcttttcttcattaattccatggcaaatttcccagatgcttctgagttatctgtttcctggtattcataccttctgcagtctctcacattgtatcaggattggtgtgttgtgagaccaacacaataggaaataagtgaaagcttagcagtcctcctgaggataggtcataaaagccattttggcctctgtattggtcctctcttggatcactaaccttggcgagaacttattgccaaattgtcaaggagctgggccttgtaaagaggcctacatggtaatgactgaaggtcccctgacaacaaccaacatcaactttccaggcatgtgaataagtcatcttggaagtggactgttcatcagtaaagatgttagatgactatagctttggctgacatcttgattgtaagtaaaggcatgagagatcctgcagtgtaactacagagataagctgttcttgaattcctgatctgtagaaattgttagagaataaacatttcgtgtttgaagccacaaaatttgcggggatcatttgttatgctgcaacaaataacttatatatccagtgtgagctctctcaaactatcttagggatgaaagatcaatgagtgctttcctccagaagttcctgcagtaattcatatccatctattatgtattctcttgtgcacagaaagataggagttacttgtgaaggatttcccacaatgattacattcatagggtttttctccagtgtgagttcttaagtgtttcttcacagctgagagattattaaaggcttttccacagtcactgcactcgtagggtttctctccggtatgtattctcttgtgcacagtaagagaaaagctactgctgaaggatttcccacactcgttacattcatagggtttttctccagtatgagttcttacgtgctgtgtcagataggagctcttcctgaaggttttcccacaatcgtgacattcataaggtttctcccctgtatgaatgctattgtgcccagtgagagaggaccttgtgctgaaagcttttccacactgattacattcatggtgattctcccccgtgtgaatcctcttgtggcttttgaggttacaactggtgcggaaaacgtgaaaacactggttacattcatagggtttttctccagtgtgaattctcaaatgcagtctaagggatgagggatcactaaatgctttcccacagtgattgcattcatagggtttctccccattatggattctcttatgaatagtaaggtaagatctgctactgaaggacttcccacattgactacagtcatagggtttttctccagtatgaattctcttgtgctgagttaggttagatttcgtgctgaagactttaaaacactgattacattcattgagtttcactccacgatgacttctttcctgtggattaagagatgaatgataactataatttataatatttgaaatacttaatgttctcctaggaatcttctctcccaggaattctgttacattattataattgatattttggctactttcagtggttgtatgtgatttctgcccagttttagctctaagaaagttaaaaaacatagatgctttgccacaagtccttatcagatgcacaaaacattttctgataacgtgtggatgaagttttgttccaacagtcaatatctgagccacagataggaaatatttacttgtgggaactctccgtgaagaaataagtttggagctaactcacacttctctaaatatttataattttcacagtgtctctccaggaacacagcattctcaattataaatgacactttcctttaatgcctctcctggttattttgtgccctttctaaacttaaggcattctcctactgtagaaaaccagaaatcacccatgttagtcttaccgtttttacacctttagactgttcttttctgaaaacattcttcttaggagttaaccatttggctttaagtagagtctccaaatctgaaacaaattgaaaagaaatttaggttgatggagaaaagaaatggaaaagtgtacacatgagtaaaggcagattctgagggatcagggtttttgaggatgtttgcaacaaagaggatttggttatgaaaattttaggtattaattttaaaaaaggattctagacaaattgagattgatcacagattgacaagaggagtgatcaggaatgcaaagtggaaaggaacttgactgaaattttcaaaagagttgcatctttgtttcttccctgagcccaaagtgaagtatgagatgatgacaagggagttagagagaaaagaaaggacatgaggaagctcacaccaaatgttctcgtgcatgtttgtcaggaacagggtattttacaaagttccctgattgacatgaactaatgtaatactcccaacccccaagtcactggccagagctattcctcacaagggctcatatccacctggtgctcacctggacaggtgcttggtagaattcctctttcctctgtcaccaccttcttgtcttgttccaactgggatatcagactgggtttattaacacgacaccctatttatggaaacaatacacatgatataggtaacagtgctggggacaaccaagtccatgaaagaaagccaacatttatgaagatggaaaagtgtgactttaggagcagtgaaataaattatgccttaattcttttcttttttttatttattttgagatggagtcttgctctgtcgcccgggttgaagtgcagtggcatgatctcggctcactgcaacctctgccttccaggttcaagcgattctcctgcctcagcctcccaagtagttgggactacaggtgcacacaaccacgcccggctaatttttgtatttttagtagagacggggtttcaccatattggccaggcaggtcttgatctcttgatctcctggcctcgtgatccacccaccttggcctcccaaagtgctgggattacaggcatgagccaccacgccctgccaattataccttaattctagtgcatatggtaactctcactgaacaaaaatgcaacaagcatattcaactagatattcagggtgatagggcataaacagccccagaaggccatgcctgagttcaaatgcacacttcagaggccccaaaacttttaaccatgaagaatataaagtcaggacaagaaatagatcttcagttcataaggcaggaattagagactgcccatgagggtgggaccatatggtcccattcatcactgtactcccaagtcactgcacagacctaggaacacagaggtgctcaagaaaacttgaaagaagtgatgacagtgacagtggtggaggacggaattccaaacgttcatccctccacaaaaacagtgagtaaactggcaaaagcggtccgaatcaactttatcggaattcttgaaatgtatcaaaagtccacagcaatcaggagaatgccttctcagaaaacccagctgaatctgggtaagagagctttatgatactttaaatggacctctttcccctgctttttctacaaccttgaagacaacagcctgcattcctagtacttgcagggagcagaacagaccttactctgtggttgctcttcctgacctgtctggtggttccctgaaggactggctcaaagggttgtctttatttatctaactccaaattctttcaggactgagctggttacctggaacacacgtgatcgacagatgtaaaggtaaatgtattagtcagtactgcttgaggcaagagaaaacagtagaagcaaacaaaagactaaccgaaaagcctgaaaggaaaaatggggaaaaagatgtttggggagtaggactttgaaaatcttcctcatattcttaagaacctgtaattccaagcacatactcagggctgggagcatgcccagaaaatacctgagaaggcacaaaaccctcatcttttggtgaccttcaggctctgcacaagccagaaatgaaggtcaaggcacagttaaatgcctacctaagtattaaaggcatgtccctatgtacacacagagcccacgtaaagagactagaagttttttccttttttgttccaggccttcaaatcactatatgaccattacgctatcagaaaagagacttcggtggccacacatgacaaatacagacattacaaagttagttctgaaatagaactattgtatattctaacaggagtttacaatatatgatattctacaactttagaacacacaatagttctatttcacaactaactttagaactgttgtatgttctatagatacaataccaactacaacaagtaaaacaaactctggagatggggaaaagtctgattcccaaattgctatattataatattccaaataccctagtttcaacaaaataattatgagggaggcaaggaaacaaacgttgggcccattacaagaaaaatgaagctggtagaaattgtcccttcagaagttcaaacactggacttaactagacaagtaaaataagtcaactatttaaaatctgctaaaagatgtaaaagaaatatgtataaagaactaaaggaaaccatgaatacaaattttcatcaaatgaaaaacagcaaaataggtacaactatggcatatcaaaaaaatacaaaaaatggaaaacattaagagacagaaactttaggaaggcaaataaaaaaatttgagttgaaaagtacaatagctgaaatgaaacattcagaacatatctgagcaggcagaagacaaaattggtgaccatgaagataggacaatcgatattatccagtctgaggagcagaaaaaagagagatgccaggtgcaatggctcatgtataatcccagcattttgggaggctgaggcaggaggactgcttgcaaccaggagttcaagaccagcctgggaaacatggtgagatcctgactctacaaaaaattaaaaaaattagctgggcatggtgatgcacgtctctagccatgcctccctatttgggaggctgaggtgggaggatcacttgagcccaggaggtcaaggctgcagtaagccacaatcactctgctgcactccggcctaggtgacagagtgagtgagaacctgtctcaaagataaagagagagagagagagagagagaatgtgagttttaaaaaagatgaacagagcctgagacctttgggataccatcgaacctaccaacatatataggatgtggagaaccagagagatgtaaagagagaaaagggtgagaaggttgaagaaataatggctaaaaacttcccaaaatttgatgaaaggcacaaatgtacaaatccaagaagctcaacaaactcaagtagaataaatttgaaaaaatagagattcatactgaaacacacacacacacacacacacattttttgagccagggttttattctgtcacccacgctggagtgcagtggtgtgatcatggctcactgcagccttaatctcctggggtcaagcaatccttccacctcagccttccaagaagctgggaccataggtgtgcaccagcacgtctgactaattttttaattttttgtagagacagggtccaagttgcccaggctggtctcatactcctgacctcaaggggtccttctgcctcagcctcccaaagtgttgggattataggcgtgaaccattgcagccggcatcaaacacatattaatcaaactgttgaaagacaaaggcagcatcctaaaaacagcaagacggagatgacttatgacgtaaacaggatcctcggtaagattacagtcaatttctcaatagaaaccatggaaaccaccaagcgctggagtggtacattcaaagagctgagaaaaaatggcaaccaagaattctatatctggcaaaactccccttcaaaaataaagaaatgaagaccttcccataaacaaagactgagtgtttgtcactattacatctaccctacaaaaaatgatcaagggtgacttcaggacaaaatgaaaagataatggagagtaacttgaatccacagaaggaagtgaagaacacaggtaaaggtaaatacagaggtgaatataaaagtcactgacaatgtgtttttggtttataacttctcttttattactacataatttaaagacaaaagcataaatgattacacatctacattaatgggcacacaatgcatacagatgcaatttgtgacaaaattactaaacagaacagctacagtgaaacaaagtttttatatactattgaaactaagttgctattaaactagattgttataaattaaaatgcttattaaaattctcagggcaaccactaagaaaataactaaaaagattaaaaagaaatgagaagggaatcaaaatggtccactagaaaatatctaacacaaaacaacaatgaaagaacttaggaacaaaaatgatatgacacgtagaaaaaagtaaatagttatagagcaaatagtaaataggcagaagtagctccttccttatcagtaattacatcattacaaggtggattttggcagaatggatttaaaaaataacccaattacagatggtccccagcttaccatggtatgattttttaactttatgatggtacaaagatcatacgcattcagtagaaagcacacttcaagtaccctacaaccattctatttttcactttcagtaccatattaaatatataatttataattgttgagatattcaatactttatttaaaatacactgctatgttagcccactgcccaactgtaggctaatgtaagtgttctgagcatgtttaggctaggctaacttatgatgttcagtgggttaggtgaattaaatgcatttttgacttttttttttttcattgttttgcatttttgacttatggtatttttaacttacaatggctttattgggacatagccccatcaaagttgcggagcatgtgtacatactgtctataagacacttgctttatattcaaagacacaaatatggccaatagtgaaagaatggaaaaagatatttcatacaataaaaattgttataaaacagagaaagacattatagttgtataaagcatcaatttatggagaaaatgtaacgattataaacatatatgtgcctaataagaactccaaaatgtatgaagtaaaaactggcataattgaaggaagatatagagtgttctataataatcgtttgagacttcaatactccactttcaataatggataaaacaacatattagaagatcaaaaaggaaacagaaggattaaacaataaactaactagacctaacaaatatataaagaacacaccacccaacaagagaatccatattcatctcaaatgcacatggaacattctccaggatagattatatgttaggctataaaaaaagtctgactaaattaaaaaacaatgaactcatacaaagtatcttccttaaccacaatggaatgaaattaaaaatgagtaacagggccaggcgcagtggctcacgcctgaaatcccagcactttgggaggtcgaggtgggtggatcacgaggtcaagagattgagaccatcccggccaacatggtggaaccctatctctactaaaaatacaaaaattagctgggcgtggtggtgcgcacctgtagtccgagctactcgggaggctgacgcaggagaatcacttgagcctgggaggcggaggttgcagtgagccgagatcgcaccactgcactccagcctggtgacagagtgagactctgtctcaaaaaaaataataaagttatgtattggaagccttaatattgttaaggtgacaatactacccaaaattatctacagagataaaacaatcactatcaaaattctgagttttttttcctttcagaaatacacaaactgatctgaaaattcatggcattgcgagggatcttgaacagacaagaagtgaaaaagaagaataaagtagaaagatttacacttactgttatcaaaacttactacaatgtaacaataatcaaggcattgtggtactgacccaaggacagatacatagaccaatggagccaggagcagtggctcatgcctgtaatccctgcactttgggaggcccaggtaggcggatcacttgaggtcaggagttcgagatatacagaccaatggaacagaattgagagtatgtaaataaactccagtgtgtatggccacataattttcaataagggtaccaaggtcatttgatggggaaagaataaaggtggtgagacaactggatatacacacatgcaaaagaatgaagttgaccctttctccacaccataagcaaaattcactcaaaatctatcacacagctgagtggaattgttaacactagaaaattcttggaagaaaacataggggtagatcttcatgaccttgacttgagcaatggtttcttaggtatcacaccaagagcacaagcaaaaaagaaaaactagatacaacagacttcatcacaattaaaattttttttgtcttctgagacggagtctcgttctgtcgcctaggctggaatatagtggatctcggctcactacaacctctgcctcccaggttcaagtgattctcttgcctcagcctcccgagtaggtgggattacaggcacctgccaccacgcctggctaatttttgcatttttagtagagatggggcttcactaagttggccaggctggtcttgaactcctgaccttaagtgatccatccatctcagcctcccaaagtgctgggattacaggcgtgagccactctgcctggtcacaattaaaacttttgtgcatcaaaggacactatcaagaaaatgaaaagacacccaaagaatagagaaatcatttatgtattatattttgaataaggatttggtacccagaatataaaatgaacttttaaaatccgacaacaaaaataaacaacccaagtaaaacatgggcagaggactgggagcggtggctcacacttgtaatgccagcactttgggaggccaaggcaggcggatcatttgaggccaggagtttgagaccagcctggccaacacagcgaaaccctgtctctataaaaaatacaaaacaatttagccaggcatggtggcacatgcctgtaattccagctacttgagaggctgaggtatgagaatcacttgaacccggaaggcagaggttgcagtgagccgagatcgtgctgcgccactgcactccagcctgggcgacagagggagactgtgtcaaaacaagcaaacaaacaaataacaacaataacaaaaatgggcaaaggacttgaatagacatttttccaaagaaaaatactcaacaagtacatgaaaagatgctccatgtcatttgtcattagaaaaatgcaaatcaaaacaagaacgagatagcacttcatacctactggtatgagtataatcaaaaaggcaagtgctgggaagatgcagagaagctggaaccctcctgcattggcgggaacgtgcaatggtgcagctgctgtggaaaagtctggcagttcctcaagaagctaaacacagacctagccttccactcctagtatatgcccaagaaaatggaaagtgggcatttaaacaaaagctcgtacacaaaaattcatagtattatagcattattcttgatagtcaaagagtggaaacaactcaaatgtttctcaatagaaaaatggattggcaaaatgtggtatgtccatacaatggaatatcattcagtcataaggaatgaagcgctggtacaacatacaacatagctaagtttttttgttttgttttttttgagacacagttgtgctctgttgcccaggctgcagtgcaatggcacaatctcagctcactgcaacctctgcctcctggttcaagcgattctcctgcctcagcctcctgactagctggggataggtgtgtgccaccacgtccggctaatttgtatttttagtggagatggggtttcaccatgttggtcaggctggtctcgaactcctgccctcgtgatccgcccgcctcggcctcccaaagtgctgggattacaggtgtgagccaccacacctggcccatagctaagtttttaaaacactgtgctacatgaaaagtcagacacaaaaggtaatgtattttgtaattacatttatatgatatgttctggataggtaaattcctaaagacagacaccagatgagtggttaccagcagcagtgggtagggaaagtaacgggtattggctgcttcatagggacggggtttccttcagggtgatgaaaatatggtgatattagatagtgttgatggttgcacaataccatgaatgtatgaaaaaccactggactggatatcttagaatggttaaaaatggtgaattttatgttgtatggattttaccacaataaaaaaagtaagcaaagcaggcaagtgttgccactggagtcattaaataaatgcaggaatgacattaggcttacctagtgaggccaggttcctgcagttctccagcatcacatccctgtacagtgtcctttgggcagggtccagcaacgcccactcctcctgggtgaactccacggccacatcctcgaaggttaccaagccctaaagcattgcaaacatcacggcttagccaaggaccacccccaccaacgtgcacaggaagaggggccaggagaacagagccagggctggggaaacctgagcacgagatgttggggggggtggttctgagctcacctcccagggttctgagctcctctcccagggttctgagctcctctcctggggttctgagctcttctccctggcttctgagctcagccctcaatgcttgtctccttaggccattcccaggtccagtgcacagtaccacagagcagctgccttttctcactcagactgggagctcctgtgatcttatttccctcaatctccaggggatcatgggcccgtgacatggcagaaagcagagaaatacttggtaagtgaatgactgatttccgtggcgtttattaattgcttgggtttagaacatcatcacgtctttacttggctttcccttaaaactctcaggagcacatgatgtactcagggaccctggagggagctctgaacctgcagtaaatgttgacacacactgacattttctgggcagccctcaccctccatctgatgcctggaaatcctgggatgcctgaggacctggtttggccatgaggctccaggctgctggaaggtatcaagtccaaccttctggccaaaggaataatgatttgggaaaaggaacatctgactcacccgtagccagcttgtcaggagctcattaaccagctctccgccctgtgtgtgtcctttttgctgagaggctgggaacagggaagacggagctggaggaggagaaatgagtcccatggattcaggcttgtctgacacccacagatctgcccctgattgaccacacccacctcccacacccacacggatgaggcaccacacagtgcccacctacgctccatgcaaacacctacccacagctctcctaagatacccaaacacagccctgtctcaccaaccaaagacaatagggctcaaggtctgactgcacttggggaagggattattcccacttcacagatgaggaaacaagttccaagggcgtcactgtgtttttatcagattcacagaaagaactaaagggagaattcaaaagctccagcacattcaccacacaggtgacatccacagacacccaaatgcctaagtcccaaatcccgagagctgcccgatcagacacggaggacctctgggcccctggggctccactcctgcctcacctgctctgcccaaccccgctcgtgtcccatgctgtgggtcagaacctttcaaggctggactctgagaaatgtcaggaccccacgactcaccagcagtcgagggcaggatgacagccgccatcctgtgactccgacagcaacagggcagccgggaagcaggacgctcctcctttatcccgcagcgctctggaagaaacgggaatgctccaagtctccgtggcctcctccctctcgggctgctggggatgggccctcctcaacccatccttcccatccttcttcaaatgcaagttccggcttccacactgggcctttattttgctgagcaggcaatgaattcagggccacctgatggaaaacttgccttcctctgtccccaacacaacgaccagtacctccctgacccacccgctttgagaacctcggcttcacgcagtctcacggcatgttcttcccatccaagcgcaccacaaacgcattcccggctactccctccttccccggggactccggcgcctccataactcctcccacctccagtcccagctcctggaggatgtcagagacccccagagtctcaggagttcctcagctccagggccctttgttccttctctcatcagccacatgtttccacaggtcccctcagccttggtcatcaccgggcactgtcccaccacccagaacaacgttcagaaactcccctctctctgaacccaacctccctcctcaacttccacggcgttcactccttttttctctcaccgcatgtcctccgaccacacgcaggcctcagtcacctcctcctgcctcggtcacccccctcctgcctcagtcaacccctctcctgcctcggtcacccccatcctgcctcagtcagcccccctcctgcctcggtcacccccctcctgcctcggtcacccccctcctgccttggtcacccccctcctgcctgtgctctgcctcagttaccccctctcctgcccatgttctgcctgttaccccaactcctgcccttggtcaccctgctcctgcctgtgctcggcctcagtcacccccctcctgcctcagtcagcccctctcctacctatgctctgccttggtcaccccctctcctgcctcagccaccccctctcttgatttcatcctcacccagcttggatgtcactgtccctcatttcagctgatttcctcctccctaccccccactgtcatgccagcccagcagaactccagccaggcgtgacttcaatcatccacctgctccaggggacattcgggcagaccaccctgtgcaaaggctgtgacgttgccactctggaataacacggtcaccaacgtgtagagaaccctcagcctgcagggcgatcccacaggtcagcatggcttcccactcgtcaaacctcctctcctctctttaaacttcacacctcctcccctgtcccctctgtggtaactgcttcctaacgagcccttgacgatcccagcctcccggtgctcacaccctgtgtaggcccgacgcacacacggaattagagctgacctgtgtgaccagcagaatatggctgaggagacagcgggggtgggtgcaggggtgactttcaggaccaggtcttggaaggcactacagctgcttccgccttggtctcctggatgttgctctagaggacaccagttgccatggtgggaagacgctcaagtggccctgtggagaggcctatgtggagaggaactgaggcctcccaccgacggccagctctgactcgcaggccatggagtggcccccggtacccgttgagccttcagatgatgcagacccagctgacagccttctgcaagtttccagccagagccttccagccaagctgctcctgaattcctgaaacacaaaaacagtgagagacgatacatggtcattgtttcaagtgactaaggtttgagatcatttgttaggcagcaagagatgacaaatcatctcattttcagcagacaatcccgatcctgcttctcagggtaaagatcatgaggaggaatctactttcctgtgttgctgccagcactgcaacctgtgccccacccttctgcctcctcccatcgcagacaaggagctgcctgccttctccgcagggcttgctgggcagttctggcctggggtccaccctcctgcttttgaggagctgtctgtgctcgaagctctctcctccgccctttcccttctagctctcccgtgctgctagacccttcctcatgcccctcaagcctgatgtggcatcttctgtagtgcgatgagcccatccttggggtacagctttctttccggttactgccccgtctgtatcccccatcccagccacagctcttcactctgtcccctttcctgagtcctcacacggtgcaatctggcttccctactatcatcccaaggacaatacccttgatggaatcgacaatgaccttactcaccagggagacgtggattgcagcaactctggcgctatttcctatctggcaggtcaacagagacacagtggcccacactcttcattctcacacactgctgggggtaacccctagggaaggaaacgtgctgatgtcaagcaaacctgcaaaaaacatttgttctttcctagaacccacttctagaaatctatctcaaaggtacacaaatactgaaagacacgtgtaagatgattcgctgtggcacttcatataatcgcagaggattgaaaacaccacaagtgaccatcagtaggggattgggtgaataaactatgtgatagctttaaggttggtgcaaaagtgattgcggtttttgccattactttcgatggcaaaacctgcaattacttttgcagcaacttaataaataacaaagaaacatgtagccaggaaaaaaaaaccccaaaccaaaaccaaaacaaagaacccctgaaaagatttctaggtattcagagagattatctccaataaatttaagtgaaaaaaaaatcaaggtacaaagcaatgtcatgtgtcctttttataagacgagaaagcctcctttctccagatttatagaataaaacgtaactccataaagccagcttctggaggtttccatgtgtgacctccatgacatgaacccaaaagataaaaggagtgaagggtgtgaatgggcagggatgggggcactggacattcagggtgagttcgggttccgtcaaaaaatcaagttggagggagtctttggctcttgggcctctgtggtagacagatgattaacttcctgctctcccaagaaaggggtctgtgttctaatccccagaacctctggatctactcccttacatggcaaaagggattctgcagctgtgaggaaggcaaggatcctgacatgggggatgatgctgggtgggcccactgtgattacaggggtccttataaaagggaaacaggagggtcagttcaaagaaggatgggatgagatgagagaagaagggagcgtgtgtgtagcagggaggagataacatacagagagactggaagatgctgccctgctggtgttgatgatggaggaacaagccacagtcagggaaggctggtggcctctacaagatgaaaaacgcaggaaatgggttctcccctagagcctctagagcagtggtccccaacctttctggtaccagggactggtttcgtggaagacaatttttccatggagcacggggcggcagtggggctgggcagggaatggtttcaggatgatgttttataagcacattacatttattctgcactttatttctattatattacacagtaatatataatgaaataattatacgactcaccataatatagagtcagtgggagccctgagcttgttttcctgcaactagatggtcccatctgggggtgatgggagacagcaacagatcatcaggaattagattctcctaaggagtgtgcaatccagatccctcacatgcaaagttcacaatagggtttgggctcctatgagaatcgaatgctgccactgatcggccaggaggtggagctcaggtggtaatgcgagcaatgaggagtggctgtaaatacagatgaagcttcgctcacctgccactcacatcttgctgtgcagccctgtttataagcactggtccgtggcccaggggctggggactcctgctctagagggaatgcaggccttccagcttattgaggatttctgacctccagcaaggcaagaggataaatgtgtgttgttttaagtccctgaatttgtggtagtttgttatagcatcaataggaaactaacatgcctttcacatcacaccttccctttgggtgagttcagcagacccaggcaactgctgcagaacttccctaccctctacagggggaagtatctcctttttccccgtaacagacctaatgtgcaggtaggcacacagtagttccagtcactgagctggggagtgagggggggttggcctccagccagctcactgggcctccaagaaaaaaacaagtagagaaggtacctgggacattttcaggccccaagtccctattcaaggctgtctggaagcagaaatttcccactaggacaggaggggtctcttcagtttacagatcctgtgacacctgccctgccctggatacagtgctggaggatggtcacagcagatgggccactctatgtcagctgcccaacacaacttctggtgatgatggaaatgttctataattctgctctaatacttgaaatgtgactagtatggctgagaaaataaattttattttttttgggagcaatcatctgattcctaaactacctccaaacaccccctcttttgcctcttaaatgtcttccttctgaatcctgaagtccttgttatctgcatgcttacactacatgcaaattgcatcaccctctggcccacaactctttagtgtcttcccactggcctgagaacagagtctgaagtgaggcctagtatggttctgcctccctcttgatcttggtcttggtcacacttctttccctattcttttttttttttttttttttttttgaggagtctcactcttacacccaggctgaatgcagtggtgcaatctctgctcactgcaacctcagcctcccaggttcaagcaattctcttgtctcagcctcccgagcagctgggactacaggtgtgcaccaccacacccagctaattttcgtatttttagtagagacggggtttcaccatgttggccaggctggtcttgaacttctgacatcaggtgatcagcccaccttggtctcctaaagtgctgggattacaggtgtgagccactgcgcccagcttctttccctgttcttgtctcggcttcagccatccctgtgttcccagtgcagggagcgtggcagcctctctcctgctgcagggcctttccttacacagcttcttcgacggcagtgctctcttggacataaccctgtcccctcactctagtcgagccctatgactagctacatctgaccccaacttggagatggagcagcaattccctttttcaggggcctgtgaaccccaagtgggaaaataaaggaaaatcctgaagttcctttaagggaaattccgagcatccagctagccccaaaagtaaatatggaacttgttaaacaggaaggtaatagtaacctaaaacaacagccaaagaagttaaggctccagagatgttcgctttccccatggaaactaaagataacatcttaacatgcgtccctgagttgcctttcagaggctgggactcccactgaggaccccaccaaatggagctgctggctcagagaccccagataagcgggacatgaaggctgagcttcagcgttctttgtgctaagtttcttcttgaggggcttggagaaagtcacttctcccagccagttaacattttcctactgactctaaatttttaaacaaagcttcttttctttaaccaattacaaatcagaaaaatctttgaatctacctatgacaagctcctgcttcaagacatccttgcccttttaagtctaaaccagtgtgtaacctccatgtattgctttatgattttgcctgtagcttctgcttttctgtaacttaccattgccttcagaaatccttgcctagccgggcacggtggctcatgtctgtaatcccagcactttgggaggcctaggcaggcggatcacctgaggtcaggagtttgaggccaacctggctaacatggtgaaactctgtctctactcaaaatacaaaaaatttgccaggtgtggtggtatgtgcctgtaatcctagggactggggaggctgaggcaggaaaatcacttgaacctgggaggcagacgttgcagtgagctgagatcgtgccattgcactccagcctgggtgaccaagtgagattctgtctcattaaaaaaaaaaaaaaggccgggtgtggtggctcatgcctgtatcatctcagcactttgggaggctgaggcgggtggatcacgaagtcaggagattaagaccagccgggccaacatggtgaaaccccgtctctactgaaaatacaaaaattaaccgggcatggtggtaggcgcctgtaatcccagctactcaggaggctgcggcagaactgcttgaacccgggaggccgggggttgcagtgagctgagattgcaacacagtactccagcctgggtaacagagtgagactccatctcaaaaaaaaaaaaattccttgcctaaaagccactggggaggccaggatttgaacatttaatgtctggtcctccttgcttagtgctgtgcaataaaagcctttctatctatcgtagcaaccctcaatatagacatctggtttcactgcaccaccaggtgagcagaccccagtttggttctgtaacaacttaagctctcaagctaaatatccttcccaagaaagcttccctgttccctctgatcaagttcactagtgccaagctcccacatcactcctgtcattcatggtttaaaatttatcttccctgttagaaggtaaactttatgtaggacaggggccatttcaggtcctccagggtccctgtgcatctgacctaggacctgactcatggaggcgacctggtttgccaaggattgtcccggtttgaacactggatgccctgtgccctagcaaaccccttggtcctgaaaaaatgaggatggttggtcaccattaactgtgcactcaaataatatctattgcatgataagtaaacattccttcaagaatgctgtaggaaagctagaatggaaaaggtgaacacacacacaattagtagaaaccccacaatttaatactagattacttaacatgattctctgcaatatgaatcaccatactgttatttcagagaagttttaagaaacaaagttaattcctattaggaggtgatatcgttggctctgtgtccccccacccaaatctcatctcgagttgtaataatccctatgtgtcagaggagggtcctggtaggaggtgactgaatcatgggggcggacttcccccttgctgttctcctgatagtaagttcccacaagatctgatggtttagaagtttggcgtttatgtcttctctctctctcctgctgccatgtaagacgtgccttgctttccctttgctttctgccatgatcgtaagtttcctgaggcctcccccgccatgcagaactgagtcaattaaacttctttcctttgtaagtcactcagtctcagggagttatttatagcagtgtgaaaactctcaggtagttctttatagcagtgtgaaaaaggactaatacaggaggcaaggtgcagaggacaatctttttggaaaccagttccctacccttcaatctataagttgttgcttaatattcttccaaatgttttcaaatctcattaggaaaaaaaaaatcccattactcaaaacacatctggtcgccggtcaatttaattttaaatttgttactaataaatcatcctttttacaaatgcccttatattttgaagtttggtggagggccaatatgcctttagaaatcaaatcaacagctgggtgcggtggctcttgcctgtaatcccagcactttgggaggctgaggtgggcggaccacttgaggtcaggagttaaagaccagcctggccaacatggcaaaaacctgtctctactaaaaatacaaacaaaattagctgggcgtggtggcacttgcctgtagtcccagctactcaggaaactgaggcaggagatttgcttgagtctgggaggtggaggttgacatgagccaagatcgcgccactgcactccaacctggccaacagagtgagacttggtctcaagaaaaaaaaaaaaagtcaaatcaaacaggcctgaaaaatgttgctaagtagtcctgctagttgttagtgggaagacttgtaacactacatatacatgtaaatattttctatacttatataaaattcagaaacttttagcattacggcataccagaaaatctgtctttagctacagttacacatctttacgttatttgtatgtttgttttgtggatacttatttgcatgtaactgtatttacttatttacacacatgtaaccataaacacctctgtctttttaccttgaactttccttaagataccttcactcttagtgacttcaatgtggttacaaccccagcacaggaaaagcccacgaggagttcttctacacagcagagcctgctgaaaccttgttgtaggttccacactgtactcacctggtcacccaaaaacccacaacaacaggtggaccttgtggcaggcttcaacacgaatctgagcttgaatgatgcttttctcatctgaaaaaaaaaaaaagacacaaagatttctttcgaggctttgtataggttgtacagttgttggatacggctgccggaaacaccatcccattcactttttttgggtactcaatgattaaatgtgtaataagggcccagcctgtgggccatgactggctttacctgattcccatctggccatctgctccgtaagaggggagaaagcagcttaacgctgtgtgcatttgacttgctcaacttactacgctggagagagattctatggtgactccacaggctttaaaaatatcttgtcacttagaggccctattaagtgactaaactgaatttttaacaatttatgtagtttattcagaactgcagagattttttttttaaggccctagagcagggtttcccaacctggcactactgataattctttgttgtgggggactgtcctgtacaacgtaggatctttaagagcaagcagcgtccctcttccccggcctccaccctctaggtgacagtagcagcctcccctccccacaatttgtgaaaaccacagtcgtctccagctacagccaaaagtcccctggggtgcggaatcgccccgggtgagggcgactggggttccctgaggaggcaacagcggcgcggggccccgacccaggagcaagcagcagcttcgtgctgacctaagctcacagcccgaggcctcatgaaccgaaacacggctccctggagggacgcagggcccgtggctggcggtgtccgcggcccacgtcgccccctggactcggacccgagcccccgccagtcgctcaccgagcccggcccctcccgcggggccaaaagcgccgactcgcggggacggagggactcgctccccgctgccccacgcgcggcccctcccacggtaccgccccgcgcttccgcttccggtctggggagaggtgcgctgcacgtccccttccggctcgcgcgggcagcctcgcagagtcgagcgtgttgggggttcggcgcttaggcgacaggcgcggcgggcgggagcggcggccgcgaaccccagccttgggcagaggtgttctagtttgcttagtgggcacaaagttgggccctggcctggggcagtagcgggggtaaggttggccctgggggcggggccaggctgtgagccgcacgaggcctgggggcggggctggttgtgggcggagatcagttccggggcggggctgaaggcggggaaccggctgaggccgtaccaggcctggagggcgaggctgattgggcagagaccagttccagggtcggggctgtgggtggggcccagttctcggggcggatggtataaggcttctagagcggggatgactgagcagagaccagttacaggggtggagacctccatttccggggcggggctgagcgggaaccaggctgtggttgtgacagccctggaggttggggctggctgtgggcggagataagctccgggccgggcggagggcggggactaggctgtgggtgtaccggtcttggagggcagtggtgattggcagagagcagttctaggggcggagctatggggtggcagcaagcctgggggcggggctgactgtgggcggagaccagttctgggggcgggactgtgggctgcaccaggcctggggagggggcagtgggtggagaccagttccaggggcagggatctgggtatgaataaaagggtgtatgatgtgggtgggttgggataggcccaggagccaggattgtgggagatcagattcaggggtagggccttccttggatccctagattgttgatacagttactgccccatgttcatacaacccaataggatcagattatgtatgcacatttgtctataacttgctttcccaaggcagaacatagtgatttaacactaagagtttaggggagcaggagaggactgggtcatagatacacatataggaaaacttaagaatggtacaaagtcagtcaaatattctcccaccacggtctttcagttcttttgctcagaggcaaaaataattttctcctctatctttccagatatagtgtggacatgtatgtgtgtgtatgtgtgtatgccgtagtcatattcatggaataaatgctattacctcccccccaacaagtctctgttttatacaccatggatatagactgaacaaaataggtaaacgtccttgccctcagagaacgtgcattttagttgtgagttgggcaggagaaatggacagtgaatgtgataaatagaatacatggtgggttggtgcgttagataccactaagtgctggttggacctggtggcttacgcttgtaatcccaacactttgggaggccgaggcaggcagatcacctgaggtcaggagttcgagaccagcctgccaacatggtgaaaccccgtctctactaaaaatacaaaattagccgggcgtggtggcggatgccttgtaatcccaggtacttgggaggctgaggcaggagaatagcttgaactcgggaggtggaggttgaagtgagccgagattgcagccggtgcactccagcccgggtgacgagcaagactccatctcaaaaaacaaaacaaaacaaaaaccaaaaaccataaacaaaaaaagatactggtaagtgcaaagggaaaaaattttatgtaagagagtggtaacatttaaaatcagccaggaagaaatactttcaatgaatgatattgtttcatgcacccgtcctttcagaaaaaaatagttagatctctgcttcccaaaaatatccattttcaggtggctgaaggaagtttaagcaaaaatgaacaagttcaaaattcaatatactaggaaagttcactgtggaaagactgttctcttcaacaaattgtgctgggacaactagatgccaatatacaaaagaatgaaattgggctgggcgtggtggctcacgcctgtaaccccagcactttgggaggctgaggcaggcagatcacgaggtcaagatatcgagaccatcctggctaacatggtgaaaccccgtctctactaaaaataccaaaattagctgggcgtggtggcgggcgcctatagtcccagctactcgggagactgaggcagaagaatcgtttgaacccaggaggtggagattgcagtgagccgagatcaccccactgcactccagcctgagaacagagcgagactccatcaaaaaaaaaaaacaaaccaaaaccaaaaaaaaacaaaaaaaaaaccaaccaaccaagaaacaaacaaaaaacagagaatgaaattggacctctacttcacaccatgtacaaaagtgagctcaaaatagatcatagacctaaaggtaagagctaaaactataaacttcttggaagaaaacataggtgtcaaactttgtgatcttgggttaggcaattgtttcttagatatgacatcaaaaacaggtggcgaaagaaaaaatatataaattggacttaacattaaaaaacattgatgcttcaaaggacaccatcaagaaaaaagacaaacatggactgggtgaagacatttacaaatgatttatctgatacatgacttgtattcaaaatatataaaggcttgcgactcagcaataaaaagatacccaattaaaagtgaacaaagagtttttttttttttttctttttgaggtggagtctccttctgtcacctaggctggagtgctgtggcaccattttggctcactgcatcctctgcctcctggattcaagcgattctcctgcctcagcctcccaagtagctgggaccacaggcgttcaccaccacgcctggctaatttttgtatttttagcagagagagggttttgccatgttggccaggctggtcttgaactcctgacctcaagtgatctgcccaccttggcctccctaagtgctgggattacaggtgtgagccactgcacccagcctgaaaaatgaacaaagagttcgaatcgtcatttctacaaagaagatacacaaatggcaaatatatacatgaaaagatgctcggccccattaatcattagggaagttaatatcaaaacttcaataaaatactacttcacacccattgggataattaaaattaaaaagatagccaataacaaagattggcaaagacaaggagaaattggaattcttatacattgctgtcaggattgtaaaatggtgcacccactttgcaaaatagtttggcagttcctcaaaaagtcatagagttgccacgtgacccagcaattttatttccagtatatgcccaagagaaatgaaaacatgtgttcacatgacagcttgtacatgaatgttcatagcagcattatacataatagcccaaaattttgtatgtcccaaatatcagtcaactgatgaatggataaataaaatgtggtatatccacacaacggattattattcatccattaaacagaatacatattccatggatgaaccttgaaaacattacggtaagtaaaagaagccactcataaaaaacccacattttgtataattcaatttaaataaaatttccagaataagaaaatccaaagagacaatagattagtggcaaatgttggggaaaagggaaatgaggggaagtgggtaatggtatggatttcattttagatgaaaataagattagatagtggtgacgattgcgcaactgtgtgaatgtactaaaaaccattttacacaaaagtgtaaaaactgtacactttaaaaggttgaatattatggtagctcaataaagtttttatttaaaaaatgtagaattatacacataaattcttcagttaggcataataagagaataaaagtggaaaaataaaatactacataaatatgagtgcttcttcctcaaaataatagaagaaaagtggaaaaagtaaaatactacaaaaatgtgagttcttctcttcttcctcttcctcctcctcctttcttccttcttccttactcctccccttcctcctcctccttgtcctcctccttcttctttcttctttcctcctcctccttcttctcttccttttcctcctcctccccccctctcctcctccttctttcttcttttttctttttttttggagacaggatcttgctttgtcacccaggctggagtgcagtggtgcaaacatggctcattgcagcctcgacctcctgggctcaagtcattctccctcctcagcttcccgagtagctgggactgcaggcgtgcaccaccacgcccagctagtttttgtattttttatagagacagggactcgccacaccacagaggctagtctcgaactcctgagcgcaagcaatccctttgccttggctgcccaaagtgctgggattttaggcatgaccccatcgtatccagcttaagtgtatcttaattttccacaccatcacattattaaatggcaaaacaaactggggataaataattgtaaaaatctatgacatgtgggctcatatcattattacataaagaatattttggataaataagcaaaagatgaacaagccagtaaaaacatcatcaaagacaaaggctatgaaccacacactcctttacaaatacatacaactgcccaatactctaattagcaaagaggcataaattaaaataatggcattatgtttgtgcctctcaagtaatgcaaaacattttaaatggccagtttgtcaagacatgaagaaatgaatgacctcgccctctgctagcagcattgataagtaccagtttctcagcaggtacttggtaacatatacccaaagctgtacgaatgtgcatatttatcaacccagcaattttacagtgatctaaatcagagaaatgtttgaaccttgttaaaaaggattgatcatctacctcctatttaatatgacagaagattagtaacaatggcaaaataagtactggtgtagccgtatgaaatgacattcatgggccttaaaacaacaatgtcaatgtacatttagttatattaaattacaatcgggatatattgttagatgtgagaagctggctgcagaatgaagtcggcagtgtgtatccatgttgtaacccacaaagtctaggaatataaaattccagggctcgacaaccacttaatgcctggaccctttctgcctcgaatgggggtggctagaaacttctctggctggagggcagaaggcagagtgcaaagttttgcctcaagccttgtgacagggataaagaccctcacccttcacactggcctcatggacaagacaagttcttgctttcccacagagtacctgagatctgaggatactttatactctgatagtcacttccggctaccttaattctgctagagtaaaaacaactagtagcttccacctaaccagatgacgcataaaataattgctactaaatatttcattccatattttggttagtaaggaagagaaggaggtaaagaaacttgaagtgaaacaactggaagggaccaagatggagcaggcagagttccttatacacaggagacagcaaggctgaaattctacccagaagatcagcagccctggccaggcacggtggctcacgcctgtaatcccagcactttgggaggccgaggcgggcggatcatgacatcaagagattgagaccatcctggataacatggtgaaaccccgtctctactaaaaatacaaaaaataagctgggcgtggtggtgcacacctgtagtcccagctactcaggaggctgaggcaggagaatcgcttgaacccaggaggcagaggttgcagtgagccgagatcgcatcactgcactgcactccagcctggacgacagagcaagactccatctcaaaaaaaaaaaaaaaaaaaaaaaaaaaaaaagatcagcagccccactatcaccttcctccagggcaaggccacctgtggaaatgacagatgtcaaataatccccaaaggaattgctaaggatggagatgtcccatggaaacaaactgcatattgcctaaccctctcccgaggacatggatatattgagatagtaaatgttttgaaggctatgcaactctgcaaacaaccaagcatgcacagaacacaggctgtctggtgataactcctagataagcaccaatatagcacctcagccacagatggcatgccacacacaatgaattctaaaagtctattttaacctgcgatggccaacatattctcatgtgtgcatgcaatcaatgtaaaaattattgagacgttttaggtgcgactggctggggctggcattgttggtggtaaaataatttcccaagacagtcgtaggtaaagaaagacagatttattagagaagatatgaagataggttgcaaggatgcaacaggcagcacagaagagaaggggccatttgcaaagaggcagaggttggaggggattttatagggtcgtgctggaggcggctatgtgcacgtgaggtgtgcagataaggtcgtgttcctgggactatgtgcagaccgaggtcttttggaacagaatgtcatgccagtgggttgtttgcagttagccatctctcagaacaattgttctcccccaaccaggggccctttccttgttgttggttacttatcttattaggactccacatgagaccttttaaatgatttttgttttttgtaatgagttccagaaatccagttcgtactttccactgatggcacatctcaatttgcgagttgaatgttatcagatgtacttgccccgtatttagattttcttttttttcttttcttttctttttttttttttttttgagacagagtctcgcactgtcgcccaggctggagtgcagtggcgccatctcggctcactgcaagctccgcctcccaggttcacgccattctcctgcctcagcctcctgagtagctgggatacaggtgtgtgccaccacacccacctgtattaatattatggctaatattttgtatttttagtagagatggggtttcactgtgttagctaggatggtctcaatctcctgacctcatgatctgcccgcctcggcctcccaaagtgctgggattacaggtgtgagccaccgtgcctggccatatttagattttctagggttcacagctgtaaagtaagattcacatgtccaggttgttccaagcatacttcaaagctttccacttcaagagtcatgtcagatgaataatgagaattcctttgggatctaacaacaaaggggtcattgtggccttagcaacagaagcagctgagaacggtgaaggaaaacagaagtttggggtggcctgaggagttgctggaggtgaggagataggagacatagatgtagatgatcttttctcagtggttcatagctaaggggaagggataggcagtagtggtgaaggagggggtcccaggaagtttaggagaggagtgtctgtgtagctcggagaaacttgaacatgtttaaatgccgaagaagggattcagtagaaaaacagaagttaaagatatgggggcatctgtaatcccagcactttgggaggttgaggcgggcagatcatgaggtcaggagttcgaggccactctggccaacatggcgaaaccccatcgctactaaaaataccaaaaaattagctggacatagaggtatgtgcctgtaatcccagctacttgggaggctgaggcaagataattgcttgaacccgggcagtggaggttgcagtgagcccagatcatcccactgtactccagtctgggctatagagcgggactccgtctcaaaaaaaaaaaaaaaacaaaaacagatgatacaaaggttacattgcaatattggaagcataaaattaacaaaaaggaagaaggaatgaggctcagatcactcttggtggataaaggaaacatatttatgtatttatgagacaaggtcttgctctgttgccaaggctagagtacagtggcctgattgccgctcactgcaacctcgacctcctgggctcaagctatcctcttcactcggcctccctcactcagctgggacctcagacatgtatcatcacccccagctaactttttaatttttagtagagatgggggtccccctacgttgccctgactggtctcaaactcctgtgttcaagtggccctcccgcctcagcctaccaaagtgctgggattagatgtgtgagccaccatgcctggcaggaaatctctttaaatacaattaaaggaaatttggaaacattcaatgcttatcagggatatttgcagatttggcaactaacgtctttgggaaccatcaggtaagttaaggagaattaaatatctatgaggaaaaaagaaagctggagaaaattttgcaacaggttttggggaaaatcaaggagtaaacatgacagtgcatacacagaaaataaagtttctacgcatgatggattcttcccagttgatggagaatattttgtatttatagtggcactaagacgtcatgtcacgtgattcttttttcagcagtgatcatatgacggtggtagccatggcgtcacagagaacagggaccttccaagtttgaagttttacaaggcaggtgtgataagtggtaaggaattttggattaatctaaatgaatttttttttttttttttagacagggtctcattctgttgctcaggctggagtgcaatgatgtgatctctgctcactgcaacctccacctcctgggttcaagtgattctcccacctcagccttccgagtagctgggactacaggtgtgcgccaccacacccagctaattctttttttttttttttggtagagatggggtttcaccatgttggccagcctggtcttgaactcctggcctcaagtgatccacccacctcggcctcccaaagtgctgagattacaggcgtggagccaccgtgcccggcctctaagggaaatattgaggtcgcagaccacagaatccaagagtgctaggaatcagaggagagagaggaaggtgaagatacggaggtccggagtaattcaaatacccaaatcacagatacttgctcctcaaggtatgttcatcaagaacaggtatctatggtatgggcatttgaattaaaaaacctggaaatcagaaatttatagtgggtgaataagttttccgatttatttatttatttgttttgagacagtctcgctctgttgcccagactggagtgcagtggtgcgatctcggctcactgccacctccagctcccgggttcaagctattctcctgcctcagcctcccgagtagctgggattacaggtgcccgccaccatgcctagctaatttttgtattttttgtagagatggggtttcgccatgttggccaggctggtcttgaactcctgacctcaagcgattcgcctgccttggcctcccaaagtgctgggattacagatgtaagccactgtgctgggtcagaattatttatttttgagcatggctgtttgggttgctgaaaatgtctggggtgtgggattaaggctcaaagagcagagcagttgataatttcattattgacttacaagctgcaggaactgtgcaaaccaagaggtcaatgtgttaaacagatgaatagtcaagtaatgcataagaatggcaggatttgggctgggcacggtcgcccatgcctgtaatcccagcactttgggaggtcgagggggggtggatcacttgagttcaggagttccagaccagcctggacaatatggtgaaacctcgtctctacaaaaaccacaaacagccaggcatggtgatgcacgcctgtagtcccagctacgcgggaggttcaggtgggtggatcacttgagcctggggaggtaaaggctgcagtgagctgtgattgcaccactgcactccagcctgagtgacggagtgggacaaaaaaaaaaaaaaaaggcaagatttgagatttagaaaaagactgtcatatttgtcatgagagggagtatcaggacttgagcatttaagagtgacaagggcagaaagagaataaaatagtactcaaacaaggagggggtttgcaggatgatgaaggagattttgaccttgaactttctgtgcttgactcaaatctgcctgatgatgtcccaggaagcaggtcagacctatccccagagggagagaggaaggatgaaagtccagaacagctgagatccttgtcctgagaaggcaggcttcattgatcaatttgaccccatttcatgatttattttaatagtgtaagaggaaaagaagtgtgatggccaagagttcacagaggaagcaacgtgactgtgtaaaccaatgcaaatcaaagcctggcttgagcacctcaatccctttgagaatgtccagttacacattcaagaggccagtaacgagaattacaccccatcctggcaatgaggtcagataccatcaatgggaggagagcttggagaagcctcagcaggtctgctggcagaggagactgcagggactccaggcttacagcagtgcaggagaactttcaagcactttggatcttgccaataccttgcaaaaacttgtccctagttacacaggtggatctctgctggaggatcttgccagtggtctggagcactcctgccccatgccccaccttgcctgctcttcagatgcggtggagataattcctgcagagggagtgggtatctcgcagctcctctgcaaacaatttctggttactgaggaagatatcaggaaacaggaagggaaagtgaagacagtcagagagagactcgcaatagcactgattgcggatggactcgctaatgaggcagagaaagtgagagaccaagaaggccgtcctgaaaaacgctaagaaaaaaagggaagatagtgcagatgaaataaagtgtaatcctttattaacatctctttgcagtgtccccaatgaggtttttttgctttaagctcttgaaactttaaaatatgccaatacttaaaaaaaaaaaaattaggctgggtgagcacctaagagcacctaagtaagtaagctcagaacagggtgcggtggctcatgcctgtaatcctagcactttgggaggctgaggcgggtgatcacttgtggccaggagttcaagaccagcctggccaacatggtgaaaccccatctatattaaaaatacaaaaattagctgggcatggtggcaggcacctataatgccagctactcgggaggctgaggcaggagaatcgcttgaacccagaggcagaggctgcagtgagccgagattgcaccactccactccagcctgggtgacagattgagactctgtttcaaaaacaaaacaaaacaaaacaaaaaattacactcctttgtgtgacacaagggaataaagacaataatttctttttgaggtgagagattgggtttcaggtgggcagggaaaggagattttttctttttcatgttatactctcatttttatttactatgtatgtatgtatgtagtccaggctggagtgcggtggtgccatcatgactcactgcaggccaggtgcggtgcctcatgcctgtaatcccagcactttgggaggccgaggtgggtggattgcttgagatcaggagttcaagaccaacctggccaacatggtgaaacctgtctctacaaaaaatacaaaacttagctgggtgtggtgatgtatacctgtagtcccagctattcgggaggctgaggcaggggaatcgcttgaacccaggaggcagaggttgcagtgagccgagatcaccccactgcactccaccctgggcaacagagcaagactccatctcacaaaacaacaacaacaacaacaaaaaccaaaaaacaaaacaaacaaaaaaccccaaaacaaacaaaccaaaaaacccaaacaaacaaacaaaacctcactgcagtcttgaactcttggactcaggtgatcctcctgcctcagcctcctgagtagctgggactacaggcacatgccattacatctggctaattttttctattttttgcagagacaaggtctcactctgttgcccaggctggtttcaaactcctagacttaagcaaacctcccacctcagcctcccaaaatgctggggttacaggtgtgggccaccatgcctggccagtattctatcatttttaacacatcaatctcagaaactggtaaatccatcaaacaaaagcaaattaatgataaagaggactggaataattcaataagcttgatcaggcaagtagacaaatagactttaactcgtattcccaacaagcagaacgatggtgcatcgttagattcttaacactgaaaagtctctctctcttttctttttttgagacaggggtcttactctgtctcccaggctggagtacagtggtgcgatcttggctcactgcaacctctgcctcctgggttcaagcgattctcatgcctcagcctcccaagtggctgggattacaggtgcccaccaccacacccagctaatttttgtatttttagtagagatgagatttcatcatgttggtcaggttggtctcgaactcttgacctctagtgattggcccacctcagcctcccaaagtgctgggattacaggcgtgagccaccacgctcggcctgaaaagtttttcttgatattattatccctcaaattgtgtcgactttcctgattcaaatttcaaacacatatagacttagagaatcagggaaagtctggtagttcattaaatgcaactctgaattaatgggcaatcaagaacagaaaaataactagagttagatagcttatttgagaacgtagatataaaaaactctttccttaaatattattttggaatccactgggatatttcacaaaaataataatcaattctgattgggtaggctttatcctgtgatgatgaggacaaagcactgaataattttataatcttgagtactgcctactgactttaagataagtgaattaagtcagacacagatagaaaatgatgcattgacctcacttctgtgtggaatctaaaaaaagtcatatagactggatgtaggctattggtattttttttcaagcaaacaaaacattaaaacacattctaaggctgcacgcagtggctcacacctgtaatcccagcactttgggaggctaacgtgggtaggtcacctgaggtcaggcattcaagaccagtctggccaacatggcgaaaccctgtctctactaaaaatacaaaaattagctgggtatggtggcacccacctgtaatctcagctactcaggaggctgaggcaggagaatcgcttgaacctgggaggcggtggttgcagtgagctgagatcgtgccattgcactccagcctgggcaacagagtgagactccatctcaaaacacaaaagaaaacaaaaccaaaaaaatccccacattctaggacacacatgattaccacgtggaagcacagagcagaaaagatgaaattttaaaataacaaatttttagggaagctataaataatatagatattgcactctattttttttttttagagatggggtctcactgtgttgcccagacttggagtgcagtggtgcaatcatactgcagcctcaacctcctgggctcaagggatcttcctgcctccgcctccctagtagctgggactataggtgtgtgccaccacatccagctatttttttcttttagtagagatgggggtctcattatgttgccaaggctggtctctaactcctggcctcaagcgatcctcctaccgtggtctcccaacatgctgggattacaggtttgagctactgtgcctggcccatagaaccatttctgacccgtttatgtcttcttggtctacttcccattgtagaggacccgtgagatggataatatgccacccagggaacactaatctggaaattctggtgcatttgagtttcagagaatgaaatagtggaagagaaacttgcaactgccagggtttcttgggggcagggatgtgggaatataaaggaacaggatgggtgtgatggctggtataggagtcaagggtgggtgtgtactgagtgacaaaggtgggagaccttacactgaagtggaatgttgattttccaccatggcaatttcttttttctttttttgagatggagtcttgctctgtcgcccaggctggagtgcaatggcgcgatcttagctcactgcaacctccacctctcagattcaagtgattctcctgcctcagcctcccgagtagctgggattacaggcacccaccactaaacccagctaatttttttgtatttttagtggagttgggtttcattatgttggtcaggctgttcttgaactcctgacttcaggtgatccacctgtcttggtctcccaaagtgctgggattacaggtgtgagccaccgtgcccagcctccatgatggcaatttctgtatcagtgaaacaggaggattccctgagctcccttgcaggacatgtgacaggggtgtggctcatctgtttggctgctgggtgcactcaaaccccttatgggacggggagcacacagacaggcaggtgcaggagccggggccagtgtccctgggctctggccccatggcagcatccacaggtgggagactgcaactcccaaagcccaagtggctgtgtgttacagtgtgctccttagccttgctgtctgtggatggctcaagtgttaaccagctcagtgccctcttggtacccaagtccttgtccagcatccaggaagaatcaggtcacacatagacttgaaggatgaatgccagggttttgttgaatgggggaggtggttctcagtgggatggatggggagctagaagggggatggagtgggaagatgatcttcccctggagtttggctgtccagtggctagtctcctctctgactgtccccagttgaactcctttcggcattcagatgctccttctcttctctctgctgtgtcgttctgccattcttctgcttgtggagcctggggtttgaggtttatatgggtataggataggggagcatggtgggccaaaaggtgactttggggcatgaaaacaggattgtctgttcccatttagggccacaggtctccaggcttgagggtggggcctttgctggggaacctccctcttctacccagtatttccctgtctcctgtccatatcatcagtaatgtagtttggatatgtgtccccaccaaatctgatgttgaattgtaatccccagtgttggaggtggagcctggtaggcggtgcttgggtcataggggcagatccttcatggtttgatgctgcctttgcaacagggagtctgtacttgtgagatctggttaagtgtgtggcacctttgctccccccaactctcccttgctcctgctctggccatgtgacatgctggccctctcttgtgacatgctggccctcccttggccttcaccatgattggaagcttcctgagacctctccagaagctgatcagatgctgacatcatgcttcctgtacagcctgcagaactgtgagccaattaaacctcttttctttaaaaattacccagtctcaggtatttcttttttctttgttttttttttttttttttttttttttttttttgagacaggatctcactctgtcattcagggtggagtgcagtggtacaatcacagttcactgcagcctcaacctcccaggctcaggtgatactcccacctctgcctcctgggtagctgggactacaggcacgcaccaccatgcctggctatttttaaaaatctttgtagagacagcattttgccatgtttcccaggctggtctcgagctcttggactcaagcaacctgcctgcctaggcctcccatagtgctaggattacaggcgtgagccaccgagcctggccaggtattttttttttttctcttgttctttttttgagacagagtctcgctctgtcactcaggctggagtgcagtggcgtgatcttggctcactgcaacctctgcttcctgggttcaagtgattctcctgtctcagcctcccaagtagctggcattacaggcgtggaccaccatgcctggctaattattgtatttttagtagagacagggtttcaccaagttggccaggctccggtcttgaactcctgacctcaagtgatccacccgcctgggcctcccaaagtgctgggattataggtgtgagccactgcgcccggccaggtatttctttatcacagtgcaagaacagcctaatacaatcattttcaccaattctggtgttcccaagggatgacatggtgcgaaaccacaacacacaactgagagttgcctttgggacttcacgaaggtggaagactgttctcttagtccaacatgaaccagtcaggggtcacgtcaaggaaggctcagagactgtgtccgaccaatatggtttatttctgccccagccaagcttctttggaccctggctgggggaaaggcaccccaggcaccggcaagttccagtcattgcagatcctccaggtctaggtgtgactggtagtagcctgggcactgttgctggacgttgtattctccttccttcttccgccggcgggtggtcacctatgagggtgaggaggaggcgtgagaatggactggtcagccgtccagggagaggagaccacaggggtgagaatatggccaaagccagaggccttatgcttcctctgtctcccttcattgtttcatttaatttctccctcagttcttttcctcttttcaccactttcttttcttctgtctccttgtttcactctcggtttaaaaaaatttttccccctccgatatccccttcatttctctctccttttgcctctgaatttctttatcaatatatcacatatctaccaatgatctatttatctatcatctagctatcaatatttatcaacctgtcaatcaattatctaccaatcaataaccatcaattatctctcacctctcaatcatctcctatttataatccatcaatcatctatcaatcacctgtcatccatcaatcatgtatttatcatctacttatcaatatctatcaactatctgttacctatcaatttattatctaccaattatctatcaaaataatctatttatcatctacctatcagctatccaccaatcatctgtcaactatcaatcatctatcgcctgtcttctgtctaaataccatttctctctcatctcattctcagtctctttctctctggcttttggtcctgatctcagccccctctctccctcccttcctcctctacatctgtccagcttaactgaggcataactgacataaaataaactgcacacatttaaagtgaatgttttgataagttctgatcataacttattgaatcgtcaccacaatcaacataaggaacatccatccatcatccccaaaactttcgtcctggccaggcatggtggctcactcctgtaatcccagcactttgggaggccaaggcgggtggatcacctgaggtcaggagttcgagaccagcctggccaacatggtaaaaccccgtctctactaaaaatacaaaaattagctgagtgtggtggtgcgcatgtgtaatcccagctacttgggaggctggggcaggaaaaacgcttgaacccgagaggcagaggttgcaatgagctgagatcgtgccattgcactccagcttgggcgatagactaagactctgtctcaagaaaaaacaaaaaaaaaacaacaaaaaaactttcttcctgctcttttacaattcctttttccctgccactgcaaacacattttcattcccaggcaaccgctgatctgattcctgtccttacagattagtttgtattttctagaatttgtctattaagggaatcatatggcatgtactcttttcttcatctggattctttcactaggcataactattttgcaatttatacatgttgctgtataatttattaatgtattaataattcctttttgttgctgaataatattccattgtcaggatatatttgttaatggacattagggttgttttcagagtttggctattacaaacaaagctgttatgaacatttacttgtgtacaagtcttcatatagacatatgtttttatttctcttagataaattactagtagtgggatggtagggtcttacggtaggtgtgtgtaattttcaaagaaatggccaagctattttccactttcactttatgagagttccagttctgtcacattttcaccaacacttgttatagtcaatcttttcaattttatccattcttgtgaaaagtggcctctcattgtgacttccgtgtacatttccctaacgactaattttgttacatttttccctcttacattattttatttacactctttgcaatcactttttctctcaatatcttgtaatcagcatataggttgtgaagtttttgagatctgcataacatagtaactatagttaataataatgtagatttcaaaattgctaagagtataggttgccaatgttcacaccacaaagaaataataagtatgagaggtgagggacatattaattagcttgattgagtcattccataattgtacatataccaaagcatcacattgtatcccctaaatatatgcattcattatttgtcaattaattaaaaataaaattataaaaagaaaataggaaagccactccgtgaactgggagaaaatatttgcaaaacatatatccagcaaaggacttgtgtatagtatagtatggttttataatatattaagaactcttacaacccaattgttaagaagacaagcaacccttccttgctcaccaggacaccgcagatcaggcatgtgatgactcccaggagtcctgccaagccgatgaggatgacagcccagaagggaaggtctggggagacaagggctggggtgagccacctcctgccacgtcccagggctccttcttggaccctatgtggcctgaggatgggcacagccctggggaagagagcttagtggctcaacacctcatgcctctgatgcccccaaaaactgggcccccagaaagccaggatccctgctatccctttactatgcctcaatagtctttgccatgggttggcaattttgatcctcatccaagactctgtgtgcctggtgctcttggacaaggcaaagcaccatcaggctaccccctccctaccctgggctggggcttctttgagacttaccagaattcccagttaagggctcatttctgttgggagaataccctagaaatgaaagaaatggagggtgcatgtgagtgtgtctttttttttttttttttctggagatggagtcttgctctgttgcccaggctagagtgcagtggcgtgatcttggctcactgcaacctctgcttcccgggttcaagcaattctcctgcttcagcctcccaagtagctgagattacaggtgcccgccaaaatgcctggctaatttttgtatgtagtgatggagttttaccatgttggccaggctggtcttgaactcctgacctcatgatccacccacctcggtctcccaaagtgctgggattacaggcgtgagccaccgcgcccggccaagtgtgtcttattcttttaaatacaattttacaagcgtacaaaaaagcagagagaagagtataataaatatgcatcacctagatttagtggtttatatttcctccaactaaaacatatacatccaatttatgatttattgacatttcagtgaaagtaaatgttttcactgaagttttagaggccagtagacaccatgacatctcaccccaaatatttcaatttgtatctctaaaaaaatgacacatggctacataagcccaaagccattattccaccacaagagtgtcataagttaaattcatgcctctgggcatggtggacctaaattgggctgggcccaagggcagtggtggagagaatggatcatcgcagttggaaactgatgggacctctctaagttttaaaattttcacccaaaaggtttttcttctgcctaaaaacacatttaagctctccttcacttggtggttttatcgtcatcttttagaattcaccttcaatgtcatttcctccaggaagccttccctgatgaccacacccatgtatgaataggttcacatcaaataatttataattgacaactgcctgttcttgttattcctcacgacagcataaactccatgaagacagggatgtaaagccatcatcaggcatggcgagaagggttactggttcctctacttctacaaccctgttatagccaactttttttttttctcaagatagagtctcactctgtcacccaggctggagtgcaatgatgtgatctcgtctcactgcaacctccgcctcctgggttcaagtgattctcctgcctcagcttcctgagtagctgggattacaggcgcaccaccatgcctgggtaattttttgtatttttagtagaggcagggttttaccatgttggccaggctggtttttaactcctgacctcgtgatccgcctgcctcggcctcccaaagtgctgggattacaggtgtgagccactgcgcccagcccatagccagcttcttaaagatgtagaagacataccaatggctaacaagcatatgaaaaaatgctcgacattactaataatcagagaaatacagattaaaaccatgatgagataccaccttacgccagtcagaatggctgttactaaaaagacaaaaaataacagatgttaaaaaggatgcaagaaaagtgaaccgttacacactgttggtgggaatgtaatttagtataatctctatgaaaaacgtggagatttctcaaataactaaaaatgaaactaccatttgatccaggaatcccacgactgggtatctacacaaaggaaaataaataattttgtcaaaaagacacctgaacctgtgtgtttatcacaaaactattcacaatagcaaagatatggaatcaacctaagtgcccatcaatggaggactgtataaagaaaatgtgatctctctctctctctacacacacacacacacacacacacacaatgcaataccacccaggcataaaaaagaatgaaatcatgtcttttgcagcaacatggatgcaagtgaaggtcattatcttaagtcaaacaactcagatacaggaagtcaaatagcacatgtatttgactaaataatgcatagacatgtcaatgctaaataatgcataggcatggacatagagagtggaataatagacagtggaaacttggaagggttggggagtggaggagagtggatgatgagaaattactcaatgggtacaatgtacattattcaggtaatagataccctaaaagcccagacttccccactgggctataaatccatgcaacaaaattgtacttgtgccccttaaatatatacaaataataattttaaaaagtagtgtgcaatatggagcagccacaagtggctttttaaattaaaattaaataaaattaaaacttcggtatctcagttacattaaccacacttcaagcttagtaatcacacatggctttgtgctgaatagcacagatagaaacattttctatcactgcagaaagttctattggatggtactgattcaaggcaaggtttggcaaactacagcgatgctgggtccatggcctgtttttagaaagcttgtgagctgacaacaattttaattaaaaaaaaaattggggctgggtgtggtggctcacgcctgtaatcccagcactttgggaggcccaggtgggcagatcacgaggtcaggagatcgagaccatcctggtcaacatggtgaaaccctgtttctactaaaaatacaaaaaaaattagccagacatggtggcaggcgcctgtagtcccagctactcaggaggctgaggcaggaaaatggcatgaacccaggaggcggagcttgcagtgggcggagatcgtgccactgcactccagcctgggtgacagagcgagactctgtctcaaaaaaaaagaaaaaataaaaacaaataaaaaacaaaaacaaaacaaaacaataacaacaaacaaacaacaaacaaaattggtaaaacaagaaaaagaaaaacctgtgacaggcatgtgaaaggcttgttgattctgaaggatcaacagtgctctcttgcacaacaataattcggaatcaaggacagtgcacacaggcattggaaggtcccgtctaaaacgttattcgcatttgacttgaaaagaaccttgtatgaaatctagttattccttctgcaaatatgacttgagtgtttattatgtgccaggcagaatatggggttcttggaatatagtggtgaaagagcaaacagttactctctgttatattcctgatacatggtacaatgtatataactattctttgaatgggtaaaattggatatgcaaagttgagccaccttgaagccatctctggagttggaaaataggtccatcctaccacatttgttgaggatgaatcacatacaacttgaaactggaagccctcattgacctgctgaggcaggaggatcacttgtggccaggaattagagaccagtctgggcaacatagtgagaccctgtctctacaaaaaatttagaaattagcaaggcgtggtgacacgtgcctgtagttccaggtactcaggaggctgaggtgggaggatcgcttgagcccaggagttcaagactgcagtgagctatgattgcaccactgtactccattctggttaacagagcgagaccctgcctctaaaagaaaaaaacaaacacaaaaaaccagaaccagctgcagtggtgcctgcctgcctgtaatcccagcactttgggaggctgaagcaggtggcatgcttgagctcaggagttcaagaccagcctgggcaatgttgcaaaaccccatctctagaaaaaatacaaaaattatccgggtgtggtggcgcatggctgtagtcccagttacttgggaggctgaagtgggtggattgcttgagtccaggggttgaggttgcagtgagctgagatcatgtcactgcactccagcctaggtgacagagtgagaccctgtctcaaaaacaaacaaacaacacaacaacaataactaatcagggtaattgtttaacactgcagctgcctgggggtggaggagcaataccatctagggcaggcaagatgggaaccaaaaaccaagtggcttgctaagtacagagagataagaagtccagaaaggagatgtgactagcctgaggtcacagagctggccagaagagggcaaatgcctcccatatccctcgggcgtccttttctttccttcaatgatgggtaaagcttaggagaactaagccactttctcccagtctgagaaagctcgatgacgaatcaaccccaagccttcagattcccagggaaggacccaggtgaggaagtgggagcttccacctcagtcccaatgacccagggagctttaccatccacaaggacactgctcctgtccagggtgaagttctgcagctgggtaccattccgggtcatccgcagaaattcctcatagatggcaactctgtctactctccgagccagtggcgagaagttacacagggagtccaccccggtgtggtgcctgttggggacagacctggaaggggacagggataagcaaagatatctgcaattttatcatgattctaggctttctccttctaggctcttcctgcagaaactttctgcaatgatgtaaacattctatgtcggccgggcacagtggctcacgcctgtaatcccagcactttgggaggcccaggcaggcggatcatgaggtcagatcgagaccatccatacaaatcacgaggtcaggagattgagaccatccatacaaatattagctgggtgtggtggcacgtgcctgtaatcccagctacttgggaggctgaggcaggagaatcacttgaatcggggagtagagattgcagtgagacgagatcacgccactgcactctagcctggtgacagagcgagactccatctcaaaaacaaaacaaaaaacaaaaaaaaaattctacatctgcactacacaatgcagccattagtagcttcatgttgttattaaatgcttaaaatgcagctagcgtgggagaagaactgaatttctaattttattccacttaattcatttaaaaatagccacagggaggtcaggcacagtggctcatgcctgttatcccagcactttgggaggccaaggcgggtggatcacttgagatcaggagttcgagaccagcctggccaacacagtgaaaccccatctctactaaaaacacaaaaattagccggtgtggtggtgcacatccataatcccagctacttgggaggctgaggcaggagaatcgcttgaacctgggaagcggaggttgcagtgagctgagattgcgccactgcactccagcctgggcaacagagggagactccgtctcaaataaataaataaataaataaataaataaataaataaagtaatagccacagggagaacatttctggaatgttggggtaacaacttctgaatacccataaaatcaatgagaacattggccaaaatagtccaaatcaatttttccagaagtctagaagtgaaccaaaggcttgcaaaaattcgaggggtgtttagttaaggaaagtgttaaatctcagtaaaaagagcaagctttgtggcattttaacttgcattatttccacagtgctctttcaagatcctcagtattttattattattattatttgtttttttttttttgagacaggctttggctctgttgcccaggctagagtgcatggcacaatgtcagctcactgcaacctctgcctcctgggctcaagccatcctcccacctcagcctcctaagtaactgggactacagcacatgccactatgctcagctgatttttgtattttttgtagagatgggttttcaccatattgcccaggctggtctcaaactcctgagctcaagcgatctacccaccttggcctcccaaagggctgggattacagtcgcaagccactgcatccagcaagatcctcggtaactttgaaaactggcagcctcagaatcatgatatctgtgaaaaccagctgcctagcagtcaaaatagctgtagagttctccagacatcaatctgcagaacatagtcactatttgatctgtttggcagctccttgaaaaagccctattctcagggcttatctttatttgttctgattcagaatttgtttagtgaggaaagcctgttctcaaggcagttgtcaaaaaaaaaaaatcattggtaccccccaccattggaaatgatacctctcattgaaaagcacagttaggctgctagattctaagtaatctggttttagtcccctccttcccccgtcttccatgggtcctgatttcagtagctgatgtcttaatgtagtagattctacactctagactccatggcctcagcaccaggtacctttatgtctgctgagatttacaccagctctcttgagtgttgaagccagttgggctccagctttaggaaaaagctagtttttagttaacagctctctatttctagggctctcttccatcaaagctatggcttggggacacttctatttaaaggacagcagaagttcctagagtcattaggtcctgagttagaacttacctgaatgttgaaacttgacagtcagaaaaataactcttgatgctgctgtttcggaagagttggttgagctgaaagacagggcgatgtttcttaggtcagaatcctggccccagtagcatcagagaattttcagccactgagcacacttctccgtctattttgcttcttgtcatgacaaccacttgcccaggtatgtatatcaaaggacatgctcttctagggtatgacttagctgtgtgaccttgggtcagctactgaacctctctgtgcttgtgtattaaatgggaataagaacctgtctttgtggattgttataaaaagtcaccctgtggctacccagtatgcataagtcagtttctgcatggcaacagagtggacataccacccccttctcaccgcatcctcaatattccttttgttcctctggtaattggtggtgcctggctgggctttgtcctgggaatatggtaggttggtgatggtgaaattcaggtagaagtgctgggtgctggagctgcttgttggttgataaactgatgactccatttctagaattaaaaaaaaagtatgtaaaaatccactatcaaggcagggttttaagaaagagatgattccagctagcttacttattcctgacagtgtgagctgagctaggcttttctttttttcttttctttttttttttttttttttttggcaggggggtcatttgttttgttttttgagacagtttcactctctttgcccaggctggagtgtaatggcgtgatcttggctcaccacaacctccacctcctgggtgcaagccattctcctgcctcagcctcccgagtagcgggattacaggcatgcgccaccctgcctggctaacttttttttttttttgtatttttaatagagacagggtttctccatgttggtcagactggtctcgaacccccgacctcaggtgatccacccgccttggcctcccaaagtgctgggattacaggtgtgagccaccgcgcctggctgagctaggattttaaaggtgggatggagggttttaggtaacagctctatattggatggaggatcttcctccatccatctgtccagcttgtatccatccacccatctacctgttcaattctctttctaccaagcattgtaagaattctctacaacatgggggaaaagagactgggtttctctgggggtgtagtcagcaattgcaggtgctgagaaacccagagtcttctaactaatgatcattgttcctaaagggtcttcttgcctttgctcttctctccccccaccctccattctgcacacagcacccagaggatgagcagaattcatttcattttctttctaaagcagaactcatgagtgtgtcatgttcctccccaagccattccagtgcccaacaaagtctctgcccacatctttggcttcaactgtcacctctccagtatcaaagtggatgctccagctacaccaatcttcttaaacttgccccaaaatgccactttttttttttttgaaatgcagttttgctctttttgcccaggcttgagtgcaatggcacaatctcggctcactgcaacctccgcctcccgagttcaagcagttctcctctctcagcctcccaagtggctgggattacaggcacgcaccaccatgcctggctaatttttgtatttttagcagagatggggtttcatcatattggtcaggctggtcttgaactcctgacctcaggtgatccacccatctcagcctctgaaagtgctgggactacaggcgtgagccaccgcacccggccagatgccatattctttctatcttctaggttatagatgcatggagcacaattctccatctattacccctggctaggtcccattctctgtcagatctcagcttcttcaccccttcctacataaaactttccaagacaaggttgtgtgttcctccttggggctcccacaggcccctgaaattcccttatcatagcaatgatcacactgtgttatcagtacgtgtttacttccattgtttatttattttttatttttatttatttatttatttttgagacagagtctccatctgtcgcccaggctggagtgcagtggcgcgatctcggctcactgcaagctctgcctcccgggttcacgccattctcctgcctcagcctcccgagtagctgcgactacaggtggccaccaccatgcctggctaattttttttgtatttttagtagagacagggtttcaccgtgttagccaggatggtctcaatctcctgacctcgtgatctgcctgcctgggcctcccaaagtactggtattacaggcgtgagccaccatgcccggcctacttccattgtttattgaatgaatgaattattcatttactgattcattcatttaattgatcattttaattgatcaattaatcaattaaatcaattctcaattacatcaattaatcaattatgtactgaatcatttattattcattaattaaatgaatgaatcaataaattgattcaaaataaatgatctattgattcattcattcaacacaattctttttacatgtaaaaatagctattctcttagatgcaatggctggtgttctgttcctgcctcgttggatgatctactgccagaggtcacctacatgggtctccagaaagcctccctttccctctctagagcctccaccaattccactggtaccgagaagccccatctttcctcataaccccacctcttccagttaggaaaccagccaccccaccttgtacctgtcacatggatgtccaccaactggtaggtggagcccagccaatggaatgaggcattcagggtcttatctagaaagacttgctccaccaggctggggtccaaattggaggagaacaatgccttgacagtgaccaacacggagtccatcctagggacagagaccacaggaattcagccagtactcagcatcagcagggtcatcggttgctgtctttaaagagcaaaagatctagaggcacccaccctcagtctagagaagggttctgatcaaaatgggaggccttcggctggatgcagtggcccaagcctgtaatctcagcactttgggaggccgaggcaggcaaattgcctgaggtcaggagttcgagaccagcctgaccaacatggcaaaaccctgtctctaataaaaatacaaaacttcaccgggtgtggtggcgcatgcctgtagtccctgctacatggggggctgaggcaggagaattgcttgaacccaggaggcagttgtagtgagccgagatcataccactgcactccagcctgagcaacagagcatgactccatctcaaaaaaaaaaaaaaaaaaaatgcttccaggaattacgtctagaagcaataacagtaacaataatcgatatttattgaacactttttatagatcaagaccactaagaagtgacttatgcattcttcatcatcactctggtggaaggtattgttaaaattatcccaatttctcccacattttccctcttgatttctactttttattattttattttattttttgagatagagtctcgctctgtcacccaggctggagtacagcctcctaggctcaggcgatcctcccacctcagcttcctgagtggctgggactacaggtgtgtgccaccatgcctggctaatttttgtattttttgtagagactaggactccctatgttgccctcgctggtcttgaacttctgggctcaagagatccacctgccctggcctcccaaagtgctgggattacaggcatgagccactgtgcccagcctacttttgattttatttgtttttaattttttggggtacatagtaggtgtttttatatttatggggtatatgagatgttttgatacaagcatgtaatgcataataatcatcagggtaaatggggtatccatcccctcaagcatatatcctttgtgttgcaaacaatccaagcatacacctttagttatattttaaaatgtacagtgaagttatttttgactacagtcaccctgttgtgctagcaaatactaggtcttattcattctttgcatttttttgttccaattaaccttctccatattcccagctgaaatacaaaaatctttgaagtttagaaatatacaaagtcagccctgtgtcctgtgaccctcctcttcccaagtataggtatcttcattccttcatccagtcatcagagacctgggttcaaatcccaactttgacagttcttgggaagttcacttttctgaccctcagttttcccatctgcacaatagggatgatttttgcactcaactcatagattctgttgtgagaattaaatgagaggaggctggttgatgttaaatattattattgggctaatattttgagttctacatcaaaaagttatattttcccaagtgtccagaaaaaaaagaaggtgtatgctgggagttggtggccccatgaggttaatcctcactccctaccttgaggatttatgggaggagatggtaggattagctagacagggatgtaggggagaatgggtaccccactggggacgtctagctcaagggtgctcagagacacagccacaagcttggtcactgcttatgaccttcagaacttacgtcaagttggtgaccaggcagaagcggaatgtgtcatgtagttgactgcctttgtagagtgtggtgacctagaaagatgggtagggagagtgggtgagatggaggcctcttgggggtggaggggccgctgatgccagtggaaaaaaacacaggacttggagcaaaggggaccagagttcaaatcctaactctgttcctaaagcactgtatgaccctaggcacaccacgcccctttctgagcctcagtttgcccatctgtgaaatgggaatggtagtcaagagagtacttttggaaactgagagagaacccagaatacatagtgaagtgaagcatttaaagtgatcacttaacagagaaatcaggtagaagagggagagaagcacacaggacagagaagacgggaggggtgagagatgccccaccttgtcctggatgtccctcagcagggtgatgtactctgaggatgtggggtctggattactgaggttccagttgacaatgtggaaatttatctggtactcgccccggattgataaattctggggtgcatagcctggagccacagagaagaagaaaaggcaacatatggtggggaaatgttgatcacaaaatgcagagccaaagttgcccagcagtcccctgcctactgtcagaatcaatttcaggtccacacgctgggcattgcaggagctcttagacagaaagttgccccaaagagagggaaaaatggaatattacacagattcttctgagctgagctttcctgcatgtgctatgcagttcccacttctaggaatgcatccttttcatttcctgcaaaactcctgctcacgcttcaagagcccagtgagagggagctccaggacagcagaggcccaagtctgtcttattcattattgtgtcccggcacagggccgggtatataacaccctcctccaggaagccctccttaatttactcctcctctcagctcccatagtaccctgttaataacagcagtggggtctttgttgtgcccgtaatttgttgttaacttgagtatgagtttttcagagacagaaaaatgtgtcttctatctccagacccagtacaaggcttggggcagaacagccacccatatatgtttgctgaatgaatgaattaatgaatgtgagttacagcagagacacaaatctttaatttgctcactcattcaatgattctttccatactatgatgtgctgatgtactgcgaaccgagggtacagtggcactcataatagaccgtaattttgttgagttcacagggtaagggggaatcagataatttaacaagtaattacagtaaagtgtgataaatgtcagccttgtgcccacctaagaactttgagaccatgtacaacaggatttctcacccttgaaattattggcatttggggctggatcattccctggggtggttgtctcctgtgcactggaaaatgggctaccgacccactaggtgccagttgcaccctccttccctccctgagttgtgatacccaaaaatgatttcggatattgcctagagtctcccagttggggggtggggtggggcagaagtgcagaattgtcccctggtaataaccactgacacagaggatccttatatagaagggacctgctatcctgtcccaaaggatgccacgactcagccacttgggttttgaattgaaattcattatggatgtacctggggggggttcattatgctaagtgaaatataccagatagagagaaacaaatactgcatgatctcacttatatgtgggatcagaagtcaaacttacagaagcagagagtagcatgatggttatcaggggctgggggcatgggggtggtgatagagaaaatggggagatgttggtcacaaaatacaaacttttagttacaagatgaataagttctggggatcgagtataaagcttgatgattatagttaataatactgtattgtaaacctgaaattttctatgagggtagaccttaaatgttctctttctctctaactcacacagacgcacacagacacacggtaactatgtgacatgaaagcagtgttaactaatttgatcatggtaatcatttcataagctacacatatattaaatcactgcattatacatcttaaatacatacaattgtatttgatagttataccgcaaccaagttggaaacaaaagtgaaggagaaagagacaaacaatttatgacattaatttggtcaaagaatttcatgctatttactcaaaataatgggaaagaccctccccttggtggtttggggaagggtgtcccccagccaggccttgggctattttttttagagaggaaagggcatacaacagggacaaataatagtcatggtgggccgggcatggtggctcatgcctgtaatcctggcactttgggaggccaaggcaggtggatcacctgaggtcaggagttcgagaccagcctgggcaacatggtgaaaccccatctctactaaaaatacaaaaattagctgagcgtggtggcatgcacctgtaaatcccagctacttgggaggctgaggcaggagaatcactgttgcagagccaagattgcaccattgcactccagcctgggtgatagagtgagactccatctcaaaaacaaagaaaccaactccccaaaagtcactgtaaatccaagttcagcctgacactcaccattgatgaagaggctatccctgtccaggacatagaagcccagttgggtgacaccatgggtcagctgactcagctcccagtaaagctgctgtatgtccagcccggggcccacagggtcagggtggtaggtgcaggtggtgtccacaccagtggctgccccatccttctcaggcctggggagagaggcatttgaggactctagagaggtcccgagacctctgcaggtaaagagcagtggagggaggagcaggggaaagctgaggaaggggtggtcacaaaaggggtggttgttactggcaaatggccaggaagtggtctcacctgagggagatcagttggcaacccaagtagaaggggcccatgctgctcttctggaacaagggtctgagcttgagaggaaggaggaagagggtaagccgaggaacagaggttgggggtaggatttatcccaccaggagctgctgggaccagggtctcaccaggtgctgaaggaccccctcggtggagttgaatgtagctgagcccttgcccatatctggtgaatactggagattggagatggtgaagttgagtgtgagggtcttcaggtggtaccccatggctgcaggaggggaggagagacgtctgcaactgagggctggtctgagactagatcagactgcgctcattattaactagtgtggccatccaagtcagaagctatgtgtcttctcccctccaagtaacaccaattctctttactgaatattcatcacatatatcctctctctcctcccctatcccagttcaggtcttattttctctcaccctgattagcacctggcagactcactggatgccctgtctaaaggacattctctatactgaacacaagaagaatctttctgaaatgacaatctcactatggctgcccctgctctagtaccatccacagctccctatggccttcagtgttaagttcaaatttcttgacttggcattcaaggcccttcccaatctggctcctgctgacctttcagtctcacttatccatccactctgggttaagctttatgtttcatgcaaaccaaatttctctcacttctccctatactctatgctgtttctggccactgaggctttgctcacagattcccctctttcagttatactattcatgccctatttgcctgaatcactcttagtcatccttaaagactcagttcaggtgaaactttctccagaaagccctcctccttcccaactatgccaggtatctcaccccaaaacatctgacattatgatggtctatttatttcataaaatctgggactccacgagggcaggtgtctgattgaaatgctattctaatcttcgaggaggaaaaatggccccaaatacctgttgtggcttctgacagaggaggcaggaatgtggtggctggcttgggagctgtggaaggaacagtccatcagagaggacaaaagcccaccacctagtgggagaagctcccctgggcttcatcagtggtccaagccaggacaaccattcacaggtgggccataaatgagactgagggaaggagtgattgtgtgagtggaggagtgagcaagatggatggatggatggatggataaaaggacaggtggaaggaaggacaagcaggtgaatgggcaagaggatgagtgggtggatgggcagatggatgaatggatggaaggacagaaggaaggaaagacaagcagatgaataggcaggaggatggatggagagatggagggatggttggaaggacagaaggaaggacaaacaggtgaatggggaaaaggatagatggatggatgatggatggatggatggttggaaggacagaaagaaggacaaacaggtgaatggggagaaggatagatggatggatggatgggtggatggatggataaaaggacagatggaaggaaggacaattgagtgaatggggaggagaatggggggagagatggctggctggatagatggatggatggaaagacagaaataaggaaacaggtgaatgaagaggagaatgaatggagagatgggtggatggttggaaggacagaaggaaagacaaaccagtgaatagggagaaggatggatggatggatggtggatggatggagagatggataaaagacagatagaaggaaggacaagcaggtgaatgggcaggaagatgggtggatggatggatggaaggacagaaggaaggaggggctagcgagtgagtgggcagaaggatgggtgggtggtggatgagtggatgggtggatggatggatggatggatggatggatgtatagaaggacagaagaaaggagggacaagcaggtgaatgggcaggaggatgggtgatggatgaatagatggataaaaggacagatggaaggaaggacgaggaggtaaatggtcaggaaaatggggtggatggatggatgggtaaatggatggacggatggatggatggaaggacaggtggtgtctgagagatgactggaaggatagaaaaatggatggctggaaagatagacgagtggatcactggatgaggcaatgggcaaatttagccaaaaccagtagccagcagagtctgcagcttgaccatgaagcctctgctggggcacttggaggagattttcttatcaggaggtacagactaacaaggtcatcatctgacctcaacctctatccctgtagggaatgcttgttcaaacttcttcctccaacccagagggacatggaaaattcacaaagccaagactatggctgcaggtctaaaaacaggccaaggactcagcattcttcctcccactgagacaatgcccctcaccacctcaggggaccagcccgaatttggggcaaccttccttcatgaatgaggagaaaagcttgaaccaagacccatggagattgaaatgggcactagattcaaagacacgtacttgtaggaggctcatctggaccaggttcattgtaaccttgaaacaaagaagtcacacgtaagaggaggtggtggaaccgtcccagatactccatgcctttgtccatatggggcccctgcctggatgcctttccctttgtgtatctagagattatggatacatttatgtatcatctaatatttgacttaaatgtgttcaccactagaaagaatttcctgatatttcaattagcactgacccttccctactcacgtctccagcatgcctccaatgagaggctctcactacctttgtgttcacaagtctatcctcctatccatccataacccccgcctccccttccaggcctcctccaatctattcctccacccaatgaatgtttattaagggcttagtatgtgcaaggctccctttacatttggggaatatagggtagaacaaaacagtctccgcccccctggagattacattaggacaggatgcacatgtaacctatctctgttcctggggcgaggcacattgtggcctggttaatagtagctgcttggtaaatctaaatgaaggaacaaaatgaagcacataagctgtgcagtttacaagggggaacagctccctgcaatagccaagttgaagggactggatgttaactgagatcatcaagacccaacccgcacctgtgtgtttatcacagcactattcacaatagcagagatgtggaatcaacctatatgtccatcagcagatgaatccataaagaaagtgtggtatatatgcacaatggaacactattcagccataaagagaaataaaaccatgctgctgaggttgcagataaaaaggagtgtttatacactgttggtgggagtgtaaattagttcatccactgtagaaagcagcaggatgattcctcaaagagctaaaaacagaactaccgtctgacccagcaatctcatcactgcatatatgcccaaaggcatataaatttttctatcataaagacacctgttcactgaagcactattcacaatagcaaagacatggaatctacttaaatgcccatcaaggatagactggataaagaaaatgaggaacatatacaccatggaatactatgcagctataaaaaagaatgagatcatgtccgttgcaggaacatggttggagctggaggtcattatccttaccaaactaatgcaggaacagaaaaccaaatactgcctcttctcacttataagtgggagctaaatgatgagaacacatggacacatagaggggaacaacacacactggggcctgcctgaggttggagggtggcgggtggcgggtggagggtgggaggagggagaggatcagaaaaaataactaatgggtactaggcttaatacttgggtggtgatgaaataatctgtacaacaaacccctgtgacatgagtttaaccatatagaaaatctgcacgtgtatgtctgaacttaaaagttagaaaaaaagaatgaatccatgtcttttgcagcaacatggatgaaactgaagttaccttaagtgaaacaagtcagacacagacagacaaatatcacatgttctcaatcataagtgggagctaaacaatgtgtagacaagaactcagagaggggaatgatagataaagggggcttggaagggtgagggggtaggagcaaggtggatgatgagaaaggactaaatggatacaatgtatgttattggagtggtggatactctgaaagctctgacttcactactgtgccatctatgcatgtaacaaaattgcacttgtaccccataactgtatacatacaacgatgatcatgaggaggatagtaataataataataaagaacatcaagacccagactagccaaaaactcgctgtgggcatgggcaagtcccttcccttctctgtgcctcagtttccctctttgctaaaataagagtaatgaaagcccaggatgtctctccacatcccggtacctacctaaaggtacctcatataagtgatatggggtgcccacctcatggggtcatgatgataagcactgttcttgggttggcggtggaggggatgaaaggcgagctattttgtcaattctccacggtcatgctttgcctctcagaaccccatttaggggatgccttcttaaatgctatcttatcctgagttctagaccaatgctgaggcccagtgtgcctgaagattagatcccatagatcttcctggtatagggggcctcaggtaggagagaagcccatccctcgtcaatggtgagaagaaagcagggaggggaaattgttttgttttgttttgagacagagtcttgctctgtcaccaggctggagtgcaatggcacaattttggctcactgcaacctctgccttctgggttcaagcgattctcctgcctcagcctcccgagtaggtgggactacaggcgtgcgccaccacacccagctaatttttgtatttttagtagagacagggtttcactatgttgtccagggtggtctcaatctcttgaccttgtgatccgcccgccttggcctcccaaagtgctgggattacaggtgtgagccactgctcacagccggaaatgtgttttttgtcccccaagtgcccccaccaggaagactcttctgtgagttaaacatgtggagtggatcatagcaccgaatgctgacaagtggagttcatatcctggttccaccactgtcaaggtaaattgcttagcctgtctaagcctcagtttcttcatctgtaaaatgggattaatcaaagtccaaccttgcattgtggttatgggagggccagtggtaatgccaagacttgaaccccaagtctttccctagagaaccggcaaacagacaccctcctggactgcagtgggggctggggggtggggcagggagatggggctgatagctgctcaccgttaaggtagaggctgtctttgtccagagagtaggggcccagccgggtgatgccatgggtctgctggctcagctcatggaacacctgcttgataggcagacctgggccgctgaggggctgcaggtaggtgcagaggaggtccacccgtgtctcagcaccgttcttcacagacctgaggagggagaggtgcagctttgggggatgaaggccacctagcacctctccacttgtggtcactgcacaactcacagtccatattttggtctcattgacagtttgcactttctccacctgaccttatctatcatctcaggatctttgcaattgctgttacttttgtctggaagcttctccccatttctccttacctggataacttcctggtcatcctccaggtctcagcttagaggactccctcctcctcctcctcctcctcttcctcctcctcttcctcctcctcttcctcctcctatcttcctaggcaaggtcaggagcctcctctgggtcccacaatcctccactcttcccctgtcactgccctggtcaccctctatgtaatcataaattatttgttcctgttcctaccagaacatggtctccacgaaggaggaaatgaaccagtttagcttactcttattatattgaagccccagaacccagcaccccttgacaactccctgcaaaaatcaaagtcctaatgaatggagaaacacaatacagcatttacatacaagtggaaaaggaagggaattctgacacatgctacaacatggatgaactttgaggacattatgcttggtgaaataagccagccatacagtataaaccaggacatataccatatgattcctccattcataggaggtcctcagaatcatcagattcacagagacagaaagtagaatggtgggtgccagaggcttgaggagggggatgaggaatgagtgtttcatggggatggagtttcagtttgggaagatgagaaagttctggagatggatgatagtggtgatggttgcacaataatgtgaatgtgcttgatgccactgaacgggaaatatagctaaaatgatcaatttaatgtgatgtgtatgttaccacaatatagaaaaaaaaaatccaagccaggtgcagtggctcacacctataatcccagcactttgggaggccgaggcggtcggatcacctgaggtcgggagttcgagaccagcctgaccaacatggagaagccccatttctactaaaaatacaaaattagccaggtgtggtggcacatgcctgtaaccccagctactcgggaggctgaggcagaggaatcgtttgaacccaggaggcggaggttgtggtgagccgagatcatgcctgggcaacaagaacaaagctgtcttaaaaaaaaaaatccaagtcctccaaggcccttcaaacttgctgatgtcttgagtctcatcctttctctcttttcttcttgctctctctctgctccagccacactggcctctttgctgttcatagaacatgccaagctcatttgcacctcaagaccttttctcatgctgttctccctgcctggaacagttttcatggccatttgggacacagcccaagattcatcctgggtaaagttgctctacccatcacttgctatttatttatgtttcatatcactttactccatttgaagccattttacttagatatttatgttcctgtttagcatctgttcttctccactgggtgagggcagggacagcatctgtcttatcactctagtacccagcacctgcctcagaggagcggtgccatgggcatcagttgactaaaaatataaatggagaagtaaatagtaaataccaagagagtgcaaactgacccaaagaagtcaagttggcaaggatgcaagaaaaggaactcttatacatggttggtgggaatggtagaggagtggtgttatgggcatgggttgagtaaaaatataaatggagaagtatctagtaaataccatgagagtgcaaaccaacccagaaaactcaagttggcaaggatgcactgaaaggaaacctttttttttttttttttttttgagatggagtctcgctctgtcgcctaggttgaagtgtgcagtggtgcgatctcagctcactgcaagccccgccttcagggttcatgccattctcctgcctcagcctctccagtagctgggactacaggcacccgccaccacgcccggctaattttttgcatttttagtagagacggggtttcaccatgttagccagggtggtctcgatctcctgacctcatgatccacccacctgggcctcgcaaagtgctgggattacaggcataagccaccatgcccggcctaggaaactcttatacactgttggtgggaatgtaaattagtacaacctcaaatgaaaaacagtatggagatttctcaaaaaacaaaaaaaaaaaatcagaactaccatttgacccagcaatcccactgttggggatctacccaatggaaaagtattagaaataaatagtggtgatggctgtatgacattgtgaatataatcaatgtcactgaattgtacatttaaaaatggttaaaatggcagattttatgttacatgtatttttgccacaatataaaaaaaatgtgatcttaaatagatgcagaaaaggaccctctgagaatagctcaacccatatatatctaaaagaaatgaggccatgtgtggtggttcatgcctgtaaaatcccagcacttcaggaggctgaggcaggtggatcacttgaggccaggaatttgagaccagcctggccaacatggcaaaaccccgtctctactaaaaatgcaaaaaaatttagcctggtgtggtgttgggcgcctgtaatccttgctacctgggaggctgaggcacgagaatcgcttgaacccgggaggcacaggttgtggtgagtgaagattgcaccactgcacttcagcctgggcagcaagagcaaaactccctgggaggttgaggcacgagaatcgcttgaactcaggaggcagagtttgcagtgagccaagattgcaccactgtactccagcttgagcgacagagtcagactctgtctcagaaaaaaaaaaaagagaagaaagaaagaaatgaaaccagtatcttaaagagatatctgcactcctatgttcattgcagcactattcaaaatagccaagatatggaaacaagctaaatgaccttcaatggatgaatgggtaaagaaaatgtggcatacacatatacaatgaaatatataagaaagatgaaaatcctgccacttgggataacatagatggagctggaggacattaggctaagtgaaataagccaggcacagaaagacaaataccgcataatctaacttataggtggaatctaaaattgtcagactcatagaagcagagagtaggatggtggttgccaggggctgggaggaggagcaaatggggtgatgctggtcaaagggtacaaacatgataactatgtagagataatagatatattaattagctgaaatgtggccatgatttaacaatgtataccaaaatatcaagttgtacactttaaatgcaagcaatttttatatgtcaaaaatcaaactgtcatgaataaataaaaaagttattaataccagtcagaataactattactaaaaagacaaaaaccaaccaaccaaccaaacaaacaacaaacaaccagatgctggcaagaataaaagaaaagggaactcttatacactgttggtgggaatccaaattagtacaatctatggaaaatggtatgaggatttctcaaagaacaaaaatgtagaactaccatttgacccagcaatcccactattggggatctacccaataaaagaaatcgttatatcaaaaaaaaagaaagaaaaaaagaaatcattatataaaaaagacacctgcacgtgtatgtttattgcagcactattcacagcaaaggtatggacccaacctaagtgtccatcagtagaagactggataaagaaaatgtggtatatatatataccacgaaatactattcagccataaaaagagtgaaatcatgtattttgcagcaacatggatggaatgggagtccattatcttaagtgaaactcagaaatagtcaaataccgcatgctctcacttataagtgggagccaatggactccatgtccattagctcatggtggaataccatacgttctcacttatacgtgagagcatggacctggagtgtggaataatagacactggatactcagaaaggtgggagagtgggagaagggtggggaacctcacttaataagtacaatgtacactattcgggtgatacaccagaagctactgtctggaagtctactgtctgcagacttcactatggaatatatgcatgtaacaaaaactgcatttgcactccttaaattcatttaaaaaaaaagaatggggccagatatggtggctcacgcctgtaatcccagcactttgggaggctgaggagggtggatcacctgaagtcaggagttcaagaccagcctgatcaacatggagacaccccatctctactaaaaatacaaaacaattagccaggcatggtggtgcctgcctgtaatcccagctactggggaggctgaggcaggataatcacttgaacccgggaggcagaggttgcagtgagccaagatcgtgccattgcactctagcctgggcaacgagagcgaaacttcatctcaaaaaaaaaaaaaggaaagataaaaagatttaaaaaaatatgtagcccaccccaacccaagagggacctcccagtcagaactctaagttcttggtggtgcgctgtgggtgggggagtttctcaccttagtgcgatgaccctgcagcctgtgtaccgtgcacccaggctgctcctctggaacaaaggactgagctgcagagggagaagggagcttgggttggtcagaggcaggcaggcaacagccctaggatgggcatggcagggctgcagcgggaggcaggcctctcaccaggtgctgcatgacgttgtctgtgatgttgaacttgagggagccgggttggcccatgtccgccatgtagcgcaggttgttgatggtgaagttcagtgtgaatggctcctcgctgaccaccccggctagggcagggggaagagagagagagatgaagctcttggggaggatgatgggtgggtggggggtggtgtgggacagggtgggggcagtgtgttctaaggaccctgtgtccgcctcttaataaacccaacggtgacttttaatggagacaactccagcagccagtaagggtgtgcttaatgatttgggatgtccagatggggtccttctacccaaatgcaggaagggaagattctgtaaaaagtaccaatggttctgatctttcccagggtaaaggctgcatattaccacactgatgcggaagtcatgactctagacatttttaaaaaatttattctctctctctctcttcctctctccccatcgatccttctctgcctttctcccatttctctctctctcctgcactcacaaccaggtatgctaatcttctatgcattggttaacatggccaacaatctttgcagccataaccaacctctcagcacttcagtttactcatctgtaaaatgagatgacaatggttcacaatgatgtttcctgcctcaaccgttgttatgaagcttaaacaagttaatcattgtaaatcatgtaagcactgctgggcacacaggtcaatatggtgtacatgtttattatataaaatatatcagcaaatgctttctaatcactccctgtgtgtggaactttatgaaagtatgagttaaggtttttttttttgttttggtttggttttgttttttgtttttgtttttttgttttgtttttgtttgagacagagtctcactttgtcgcccaggctagagtgcagtggtgtgatcttggctcactgcaagctctgcctcccaggttttatgccattctcctgcctcagcctcctgagtagctgggaccacaggcatgcaccaccacacctgactaaattttttttgtatttttagtagagacagggtttcaccgtgttagccaggatggtcttgatctcctgacctcatgatccacccgcctcggcctcccaaagtgctgggattacaggcgtgaaccacagtgtccagccaagctaaggtttaagacaaatctctagaagaaaagtttacttctccttctctccctgcctttcttcttttcaccactcttgaacttccttctgttcattcttccttctctctttccatcctttcttcttcccttccatctttcattctattaatgcatcctttctttcttgctggcttccttcctttcattgtaccttctaacatctgtctatccttcctcttccttctctcacttctttccttcctttcacccatccatccatttatccatccatccatccatccatccattcacttatccatccatctatccatccatccacctacccacccatctgtccatccatccatccatccacctacccatttatccatccatccatctatccacccacccatctgttcatccatctgtccatccatccattcatcccttcacccactcacccactgatccattcatccatccatcatcaatctttcctttcttacacctctcttttcttccttccatctacttatccatctttcctcctccttttttctttcatccatttttttctttcttcaatccactcatccatcctctctcccttcctccttccatttatcacttcttctttccatctgtcacttcttccttccatctatccaccttgccttccttccatatatacagtattggtcctacaccgctccaggaacattggaaggggagcaggggggcggggtacagaaatactctggcccttccatagccccgcccaccattgtcccaccaatgcctcctattggctgaacctaacaggaagctagttagcatgggagcctgggaaatgtagttttcatgagtcagacgtctatcccacagagcacgggaaggctggaggaggttggagaatggatccgaggacaaaaacaaaacaaaacaaaacaaaacaaaacaaaaacccatatgtggtataatagagaaagcccataagaagtcacattcctataaaagagaagcagacaacagaatataaacaaatgagttcaaaaaagtgggagaagtattgtgaaggattaacagaaaaaaaaaaccccaggatctcatttggaagtaggagtgagacaaattcgtataagaaattgacttttccttcacagtcagtagagtaaacagacaacccacagagtgggagaaaatcttcacaatctatatatccaacaaaggactaatatctagaatctacaacgaactcaaacaaattggcaagaaaaaaacaatcccatcaaaaagtgggctaaggacataaatagacagttgttgaaagaatatatacaaatggctaatgaacatatgaaaaaaatgttcaacatcactaatgaccagggaaatcaaaaccataaggtgataccaccttacttctgcaagaattgccacaatcaaaacatcaaaaaataacagatgtgtgactctgggggccaagatggtcgactataagcagcagcgctcagaggctcacattgaaaaaaactgtaataagtgtgtgatccttcctggcaaccaaaatgtccaggttccctcatcaaaattgactagaaggctggcagtgacccacagagagaaggaagagcagtgtggtgtggtggcccacctgagagacacacggggaaggggaaccccctccttccagccaagggaggtggtgagtgagcgggctacccaagagggggaaactgtgctttttccacggaactgtgcaactcacagattggaagatctcactcgcgaacccatgccactgggacctagtgtcccaaccccagaacacgcagattcttacagctggaatctgcctaagcctacggaactccccgggggaggggcgaccagcactggctgcggctgcctgctaagtcttttttgttccttggggaaggggcgacagccagcactggactcacaactgcctaacacgctaagctccctgggcgggggaagggcggcacccctttcaatagctccaggctgtacttttcccctgctagagccgggtaggctggacggcttggtcccaagacttgtccccacagcccaacacaccggctgtggcagtctgcagccagagtgcctcttcagggctaaccctgacccatccttcctcagtgggcagagcttccttgcaggatctccaaagactccagccagaggctcagagacagaatttggactccctgggcttgggcccctagtgggagggatggctgtagtctctgtggaccagcagacttagcctctcctctggtagttctgaggaatccaagcagcccagacatgtggtttccccccagtgaagaaccccctctccaccaggggacaaagtgcttcattaaatgggtcctgctctccatgccagtcaactgggcgaaaccctccaacaatagttgtcagacaccctacacaggagcgatcctactggcatcaggttggtgtccctcgaggtcagaggtcccagaagaagcaggcacctatgttcgctgctctccaagcctccttgagtgacacctccagacatgggagcgaatcagatgaatagggcctgaagtgaacccctagcaaactgcagcagccctacagaagagggacctgactattgaaagaaaaacaagcagaaagtgacaataacatcatcatcatcaacaacaacaaccaaaagacccccataaaaaccccatccaaggatcagcagcctcaaagcctgaaactaaaactcctgaagatgggaaataatcaacaaaaaaatgctgaaaacccaaaaggccagagtgcctcttttcctccaaatgaccgcaacatctctccattaagggtgcagaactggatggaggatcagatggatgaattgacagaagtaggcttcagaagatgggcaataaaaaagtacgatgagctaaaggagcatgttctaatgcaatgcaaagctaagcaccttgatgaaaggttaaaggaattgctaactagaataaccagtttagagaggaacataaaccaaccgatggagctgaaaaacacagcacaaaaacttcgtgaagcatacataagtatcaacagccaaatcgaccaagtggaagaaaggatatcagcaatgaccaagctgagcctgagctgagccttctaggaaaaccaaagagccaactacacatcatcaaggaacctaactctcttgaattctgtcccataatcctgagtcagctccaattgaattggtagcgactgaattttttttttttggtaaccattctgaagctgttttgaactgagagaaaatgaatgctattatcaattggtgatgtctgccatgaatgctgcaatcaattaatgatgtctgtcatggatgagggagtggagcagatgccatatagttttccagtgtaaactctggcagacactaaagttgaaccaaggcagaagaggaaagtttccatacattataagaaagcatacttcattccttccttccctgggaaaatccatattttcctgtagatctaaatctgtcgatctaccatgtacaaggtcctgaagcagatactagggaagcacaagggagtaagacacagttgctccaatcagcaggtttatgcactattggggtgactggatataaacacaatgttcaaagcagagaaactgtgtttgcaattgacttaaaaaatatgcaataggacttaaagtgagtgacaaaataaaaggttcccatgattcttctgcctataataattcaagattttttttagaaatcatattaaatagtactagttaaacactgagcatagcactttggtgcatattcagtagccaataagttcatatattatccattaactttgttatcaccaccaccatcataatcatcaccatccctgtcaccatcaccatcattattgtcataatcaccaccatcattaccaacatcaccatcatcatcattaccatcatcaccaccaccatcaccattgtcatcatggtcataatcaccatcaacatcatcatcattgccaccatcagtatcatcataaaaatagctctctgagaggagagattattaattgtttcatgatccatgccatatccccaggatttggcagagccccagggcttgtcacaatgctcaataaagtttgttggttggctcatcatcactagatttataaagaatttccatctttatttgactgaataatggaagagatgtttacactcatcagccatgctctaacagaggtgccattggctggtacttattcaagggaccagtagaaggggtggatccccagagtttcccaggtccactgtggtagtcccaagagctacagagaaaccctcttcaggggaagcatccaagcctctcatggcagaaaggtcagcaaataaaactatttacaggccttgctgcatatcgggcctgagctgggtctctctctggagctggccagaagggaaagggaataacttgtgccctcccagccccttcctttatgaagaggacataggggcataggaagacaggacagctcctgccctgcttggtgtataattggggctactggagcatcggttgaatactcactgctggtggtgggtacagagctccgatgggtgaaacctgcacagagaaggagggaggagagtgggtaagggttaagggagaggtggggaatcaaataggggtcacagataccctagtggaatggaagaagtttcaaggaacaggggcctttgaagattctctatcagtaccctcagatcagggaagaaggtactgaggatgaactcagtccaagatgaagaaactatgaagttcagacatcagtcatcacatacagacaacatagccaagacgtcaatggccagtcagggagtgtgacctcaagtcagagagtaagaagctgtccagcaaagaggaagaatctccaaccacatcacagccgctcaccattgacatagagactgtccctgtccagtgtgtaggggcccagctcagtgatgctgtgggtcagctggctcagctccaaatacagctgctctctgtccagcccagggcctgtggggtcagggcggtgggtgcagatggcatccactccggtggcttccccatctttctctggcctagggagggcagataagggggatgacattaaatagattgcctatggggaggcatcctgagattcctgggggcaggacaggaaggggacagaggaaatgagaatcctggtagacaggtgagaagccatactaagattctctgaatgcaccaacttccaggcagcctgggaatgtgagtagagtcaggaatacaagaattttataaaattgcattctcatggtatggggacaggagagcccagacttgagaaatattaagagctggaattggggatgaaagcaagtggatgggggatgtttatcttgagagaaaccttggaagagaatttaacacctgaaggagagggaggtagggagaagtaagaaattcagaaggatgaccaaagtagaagcctgatctggctgatgggccctgcaaattctctcgattgatgggggaggtggtaggatcagcagatatgttcatcctggagccaccaacgcctgaattccacttgtgctgaggacttccatagggagggaaggaagaaagctgatgaaactccttgggcctgggaacacttggggtagccagactggttattctcagttctcacctgagcaaggtcagcctgcagccagagtacagagggccaacactggtgttcttgaacaagggccttagctgtggaggaggaagagggaggtgagtaagatggctgaggacatagaagtgaggaagatgtaaggtggaaggggctgtaatcagggggcggggctatctctcaggtgaggggaggtgggtgagatcttcttccatgccttggaatgggtgacgtaggtggaacaagacaaggtgggcagggcagagtgaggtgggcagggctctcaccaggccctgaaggaccctctctgtagtgttgaacttcctggagccaggccacatgttctcctcataccgcaggttagtgatggtgaagttgagggtgaatagtatcaggagatggctggcagctgtagtggaggtgggaaataaacactatgttcaaaagtagagaacatttaagagtttgtaatagatttatttctaaacatatgcaaccagatttaaagagagtgataaaatagaaggttttcatgcctcccttgactataacgatcaaagtttttcatagagcatgctaaataataatagttagatgctgagcataacctttggtgatgttctgtgttccataatactagacactatctattacctttgttatcaccaccatcatcatcaccaacactgtgaccatcattttcattattgtcatcaccaccaccatcaggacaaaaaccatgatcttcataatccctatcatctccaccaccatcaccatcatcatccacatcatcacctgcaccatcaccaccaggaacatggtcaccaacaccatcactgtttcatccttaccatcatgacaatcaccaccatcatcctcattatcatcatgatcaccaccatcaccaccacaaccacaaccatgacggtccacatcaccaccactagtaccgtgatcaccaacaccatcatcacatcatccttaaccatcataaccaccaccactatcatcatcatcctcattgtcaatatcaccaccacattgtcaatcaccaccacaaccaccaccatcaccaccaccactgtcatccttcccataatcaccaccaccactatcatcatcatcatcacatcatcattactgtcaaaaccactaccatcatcaatatcatcatcatcatcttcataatcaccatcatcatcacatcatggtcataagcatcaccatcattattgtaatcatctccagcaacatcatcatcaccactatcccacatcatcctcaaaataaaagaagctctctgagggcagagatttttacctcttttgtgttccctgccttatctctagggcctggcagagagtgggtactcaaagaagtttgttgggtgactcatcatcagtaaatttgctatgatttttaatcttatttgagtgaaaaggacagagatgttgacactcatcatgcatactctaatagaggtgccattgactggtacttacctgaagggccaaatatcgaggctggagtcttagatgctcccagatacactgtgggggtcccaggagctgaggagaagcccgcattggttaaagcagcataagctctttcatggcagaaatgccagcagataggaatatttctgcatgtggggcttgagattagtgtctctctggagctgggccagagggaaagggaatcacttgtgccctctcagatctttccctcatgaagaagatataggggcataggagaagggggtcagctcctgtcctgcttggagtaggactggggttactggaacattagtagaatactcactgctggtggtggacacagagctccgatgagtgaaacctgcatagagagggagggaggagagtgggaaagggttaagggaaaggtgggggaccaaaaggggtcagtgctaccatggtgcaattgaaggagtttcagggaacatgggctttgaggattctatacaagtacactcagatcagggaagaaggtcctgaggatgaaggtctccagtacaagatgaagaagaaacggtgaagttcatatcaatcatcaaatacagacaacatggccaagaccagtggccaggcagggagagtgacctcaagacagagagtagaggcctgctcagcaaggaagaagaaactccaaccacatcacaattgctcaccattgacaaagaggctgtcgttgtccagggcataggggcccagctcagtgatattgtgggtcagctggctcagctcccaatacagctgctctctgtccagcctagggcttttggggtcagggtggtgggtgcagatggcatccactccagtggctgtcccatccttttcaggcctggagagggcaggtgaggggaataataataaagttttgtctagggaggagtcccaagattgctgagggaaggacaagaaggggccacaggaaatgagaagcctggtacacagatgagaagccacacttagattctctgagtgcactgactactgtccagcttgggacggtgagcatacttgtggataaaagaatttttctaacatttcagtgtggttcttgcattctcatggcatggggacaggacagcctagacttgagacaggtgacaagctggaattgggaattaaacaagtgaatgaggcacatttgtcttgagagaaatcttagttagagaatttaacacctaagggcaagggaggtggggagaaaagagggaattcagagggatggccagggtggaagtccaatcctgctgatggaccctgtggaaactctcagtcaatttgggtgtgatggcagggggcagtggtaatattgggagacaggttagtcttggagccactgttccttgagttccatctttgatcagaataaccacagagagggcaagaaaaaagaagtccacactcatggagactgggaacaattggggcagacaggttggcaattctaaggtctcacctgagcaaagtcagtctgcagccagagtacagagggccaacactggtgctcttgaacagggacctgagctgtgggagagggagagggaggtgagtaggatggctgagggggtagcgtcaggggactagtcattggggctggcaccagtaggcgggcctggcatcagtggatgggggctcacggctctgggtgtgagaggaggtgggtgagatcttcttccatgccctgtcatgagtgagacaggtggaactagacaaggtgaactgggcagagtgagatgggcggggctcttaccaggccctgaaggaccctctccgtggtgttgaacttcctggagccagggtgctgcatgttctcctcataccgcaggttggtgatggtgaagttgagagtgaatagcaccaggagagggctggcagctgtcgtggaggtgggaaagaaacaacatgttcaaaagtggagaactttatatatttccaaaaggcctacttctaaacatatgcaacaggatttaaagagagaataatataaaaagtttccatgcgtcccttgactataacaacagaagtttctaacaaagcctactaaataatagtagtagttagcatacctcttggtgcatattcagagttctataatactaaatattatctgttacctttattattaccattgtcatcatcaatgtcaccaacactgtgaccctcactattattgtcatcaccaccagcatcagcaccacccacatcagcaccaaaatcatgaccaacagtgtggtagcatccccactaccatcatcatcatcatcaccaccaccacaatcatcatcatttgcatcatgatcaccagcaccatgattaccaacaccattgtcgtatcatcattattctcatcaccacaaccaccatcacaaccatcatcattataatcatcattatcttcattgtaaccatcacaatcactattgtcaatcactaccacaaccgccaccatccttaccaccatcattcttcccataatcacccccacaactgtcctgatcatcatcacatgattaccatcataaccaccaccactaccatcatcatcattattctcattgtcaacatcgtcattactattgtcaatcactaccaagactaccaccatcaccaacaccactatcatccttcccataatcaccaccaccattgtaatcatcatcacagcatcaccatcataacccctgccaccaccatcatcatcatcaccaccaccatcttcataattatcatccttatcaccatcatcatcactagcatcaccattcttattgtcatcatctccagtaacttcaccaccaccaactcccatcaccctcacaataaaataagctttcttgcagcagatatttttaactgttttgtgtccccttccttatccctagagccctgcagaaactaggcactcaattaagtttgctggatgactcctcatccgtagattcactaggattttttatctttatttaagtgaaaatggcagagatgttgacagtcatcaggcatgctctaacagagatgcgattgatttgtacttacccgagggaccaggtttagaaactggagtcccagatgttcccaggtccactgtgggggtcccaggaactgaggagaaggcctcattagtgaaagtgttgaaccctctcatggcagaaatgccagcaggtaggagtatttatggaccttgctgcatgtggggcttgagctgggtctctctctgaagagacttgggccagaagggaaagggagtaacttgtgctgtcccagctcctttgctcatagaggacataggggcatgtgaggaggggtcagttcttgccctgcatgatgtaggatcaggagcactggaaatcagtggatactcactgctagtggtgggcacagagctccgctgtgtgaaacctgcatagagagggagggaagagggtgggtaagggttaagggagtggtggggaactatataggggtcagggtaccctggtgcaatggaaggaatttcccagaacacgaaccattgaagattctctatcagcaccctcagatccagaaagcagatcctgaggatgaactcagtccaagatgaaatagaaaccatgaagttccaacctcagccatcacatacagacaacatggatgagcattcaatagccaggcagggagcgtgacctcaaggcagagagtagaggctgcccagcaaggaggaagagactccaaccacatcacaactactcaccattgacatagagactgtccctgtccagggtgtaggggcccagctcagtgatgctgtgggtcagctggctcagctcccagtatagctgctctctgtccagtccagggcttttgggatcagggcggtaggtgcagatggcatccactttggtggctgccccatccttcttgggcctggggagggcaagattggggaaagacaatacacggattgcctagggaggggttctgagatcccacagggcaggacaggagggggccagaggaaatgagaagcctggtagagaagtgagaagccatacttccattctctgagtgcactgactcttagcaactatgagcagaatcatggatgcaaggatttttataaaattgcaaagtggaaactgcattcttgtagcatggggtaaggagaactcatacttgagacaggtgaagagctaggtttggggatgaaagcaagtggacgaggcatgtttttcttgggagaaatcctgggaacagaattgaaccacttgtggaaaggcaggtaggggaaaggagggaattcagagggatgaccaaggtagaagctcagtcctgctgatgggctctgcatctctcagttgaggtgggaggtggtgggaacaggaagcacattggtcttagagccactgcctcctggattccacctggctgcggacatctccagggagtgcagaagggaagcaggtcaaactgctcagatcagtcagactggctgttctcagttctcacctgagcaaggtcagtctgcagccagagtacagagggccaacactggtgttcttgaacacaggcctgagctgtggaggagggagagggaggtgagtgggaggactgaagtcataggggtgtggtagaagggaggtgggcagggctggcaacagttggtggggctggcatcagtggttggggtatgcatatctgggggcaagatgaggtagatgagatcttccatgctctgcaataggtgaggtgggcaggactaaacatggtgagtggggtagaatgaggtatgtggggctcttaccagaccctgaaggactctctccgtggtgttaaactttctagagccagggtgatgcatgttctcctcataccgcaggttagtgatggtgaagttaattgtgaatagcaccaggagagggctggcggctatagtgaagatgggaaataaacagtgttcaaaagtagactaacacttaagaatttgtgatagaattgtttctaaacatatgcaacatgatttaaagtgacaaaataaaaggttttcacgcctcccttcactgtaatggtacatagttctcatagagcatactaaataatagtagttagatgctaagcacagctcttggtgcatattcagtattccatactactagacattatctactacctttgccaacaccacgatcatcatcaacatcagcaacactgtgaccatcgctatcattattgtcatcaccaccagcatcagcaccaaaaccatgaccatcataatccctatgatccccacccatcatcatcattacaccaccagcaccacaaccatcatcatccatataatcaccactagcacatggtcactaacaccattatcatatcattcttactatcataaccaccatcaccaccaacatcattatcatcatcaccaccatcattatcctcattgtcaacatcatgatcacattgtcaattgccatcagaaccatcacatcaccaccaccactatcatccttcccataatcatcaccaccactatcatcatcatcaccatcaaaaccactaccaccatcatcatcatcatcaccatcatcagcaacaccatcattgttgtcatcatgtccatcatccctatcattatcatcatcatcacaacaatataaccttcctgaggatagagatttttatttcttttgtgttccctgccttatccctagggccccgaagaagccagacgctcaacaaaatttgtcggttgacttgtcatcactagattcactaggacttttcatttttatttgagtgaaaatggtggagttgtaggccaggtgcggtggctcacgcctgtaatcccagcactttggggggccaaggcagacagatcacgaggtcaggagttcgagatcagtttgaccaatatggtgaagctccacctctactaaaaatataaaaattagctgggcatggtggcatgcacctgtaatcccagctactcaggaggtggaggcaggagaatcgcttgaacctaggaggcagaggttgcagtgggctgagatcacgccattgcattctagcctgggtgacagagcaagactatgtctcaaaaaagaaaaaaaagaaagaaaagaaaatggcagagatgttgacactcctcaggcatgctgtaatagagatgacactgaatagtactcactcatgggtccagacagggaggctggagttctcgaggttgccaggtgcattgtggaggtatcaggagctgaggagaaggtttgctgtattagtgaaagcagcaaaccctctcatggcagaaacaccagcaggtaggagtatttatggcccttgctgcatgtggggcagtatctccatctggagctgggccagagggaaaggggaataacttgtgctctctcttccttccctcatgaagaggatataggggcatagaaggagaggtaagctcctgccctttatgatgtaggatcaggagcactggaacatcagttaatactcacttctggtggtcgtcatagagctctgatgggtgaaacctgcattgagatggagggacgagagtgggtaagtgttaagggagtggtggggtaccctggtgcaacagaaggaatttcccagaacacgggccattgaagattctctatcagcaccctcagatttagaaagcagatcctgagggtaaattcagtttgagatgaagaagaaaccacgaagttttgaccttagccaccacatacagacaacatggttgagccttcaatagccagacgggaagtgtgacctcaggccagagaatagaggctgtccagcaaggaggaagagactccaaccacatcaaagttgctcaccattgacatagagactgtgcctgtccagggtgtaggggcccagctcagtgatgccgtgggtcagctggctcagcttccagtacagccgctctctgtccagtccagggcttttggggtcaggacgatgggtgcagacagcatccactctggtggctgccccatccttctcaggcctagggagggcagatgaagcaaataacaatttaaaaattgcctcaggaggagttctgagatttcctggggccagacaggaaggggccagaggaaatgagaagcctgggaaagaggtaataagtcacatttagattctctgagtgtcccggctgccagccagcccaggactgtgaacagagtcatagatgcaagaactttttataaaattgcaaagtaaagcctgcattctcatggcatggagacaagagtactcagacatgagacagatgaagagctggaattggggatgaaagcaagtggatgaggcatgcttgtcttgtgagaaatcctggggacagaatttaacaactggaggaaagggaggtgggtggaaaggagggaattcagagggatgaccaaggtagaagcacaattctcctcatggactctgcagaatctcgcagttgattggggtggtgctgatggtatcaggagacagattagttttgaagccaatgcttcccgaattccatctgttgtgaggacattcacagggatggcaggaaaaaaaaaaacaatccaaactctttgcgactaggaacaattggggcagctaggctagctcttctaaagtctcacctgagcaaggtcagtctgcaaccagagtacagagagctgacactggtgttcttgaacaagggcataagctgtggaagagggagagggaggtgactaggagggctggggatatagtggtggggcacaagtgtggcgagtgcagctggcaccagtgggcagggcttgtgtctctaggggagatggatgagattttcttccatggccctggcatgggtgatgttgttgggaccaggtaacgtgggaggggcagagtaagttggacaggggtctcaccagaccctgaaggaccctctccgtggtgttgaacttcctggagccagggcgacgcatgtcctcctcatactgcaggttagtgatggtaaaattgagggtgaatggcagcaggacagggccagtggctgtagtaaaaggtgtggaaacaaacactattgtgtttgtttgtatttttaatctgttgcatatagttaaaaataagtctattgcaaactcctcaagtttctcgacttttgcaatagacttgaagagtttgcaataagtttatttttaatcatatgcaacagaatttaaaatgaatgacaaaattaaaggtttccatgcccttcttgatagaaattatttttttaaaaagcatattacataatatttgttagattctgagcccagcttttggtgcatattcagtgctgaaaaatatcagatattacctgttacctttgtcatcaccattatcatcatcatcatcatcatcatcaccattattgtcagcatcagcaccaagaccatcaccacaacgataatccccatcaatactaccacaaacatcattatcaccatagtcatatcatcattaccatcataatcatcatcactgtcattatctgaataatcatcatcacgatcattgtcatcataatcactatcgccatcactattgtcatcctcaccatcacgaatgtcacaatccacatcaacaccaccacaaacatcatcatcatcaccataatcacatcatcattagcatcataaccagcaacattactgtcatcatccaaacaaccatcatcatctttaccatcattgtcaccattgttatcatcaccactccaacatcatcaccacaatcaacacaaccgtcatcatcatcattattattatcattattgtcaaaatccccataattattgtcaattgtaatccccaccaccaccatcattcttcccatgattaccaccagcataatcatcattatccttaccatcaccaccaccaccaccaccactgcaatcatcatcaccgccacccccatcatcatcatcatcacaataatataagctcactgagggcagtgttttttctttttttgttccctgatgtatatccaggtcctgatacagaggcagtgctcaatgaactgggttggttgacctatggttactacatttactatgaatttccatctttagttgagtgaataatgacagagatgtttacactcatcaaccatgctctaacagagtataaacagagatgtttacactcatcaaccatgctccaaataccattgactggtatttacctgtggggccagggagggatgatggagtctcagaggtttccggctgtactgtgaaagtcccaggagctgaggagaagccctcaacagtgaaaggagcaagtgctctcatggaagtaatgccagcaggagggactattcatggggatttttgcctgtggggcttcagctgggattctgattagctggggcagtggggaaggggaataatttgtgtcctctatgttccttcccttatggaaaggacataagggcttatgaataggggtcagctcctgctaagtttgttgtaagattggggccatgggaacatcagtagaatactcactgctggtggtgggcacagagctccgctgggtgaaacctgcatagagagggagggaggagtgtggataagagtcaagggggaggtagggggtcaaaaaaaagtcagggctaccctggtggaatgaaaggagtttcatggaacaggggcctttggagattctctgtcagaatctgagtatcagggaagaagctactaaggatgaaatcagttcaagataaagaagaaatcatgaaattctgacatcaatcaccacatacagacgtgtcctagccttcagtgtccaagcagggcatgtgacctcaagtaagagagtagaggctgcccaggcaggagaaagagactctaatcacatcagagctgcttaccattgacatagagactgtccctatccagggtgtagggtcccagctcagtgatgctgtgggtcagctggctcagctcccagtatagctgctgtctgtctagcccagggattttggggtcagggcggtgggtgcagatggcgtccactctggtggctactccatccttctcaggcctggggagaggtggtgaggggaatggcaataaatgaattgcctaaggagaggtcttgagatggcagagtgtaggacaagaaggacagaggaagtaaaaagtctaatacagaggtgggaagcaatacttagattccctgagtgtactggactgcttgggactgtgagcatagttgtggatataacagttttcccaaaatggcagggtggatcctgcattcttaaagcatggaaacaggagagctcagacttgagatagctgaagagctggaattggggatgaaaacaagtggttgaggcatgtttgtcttgagagaaatcctggttacagagtttaacacctaaagtcaagggaggtggggggaaaacagggaattctgaggaatggccagggcagaagtccagtcctgttgatggactctggaatctctcagtcagtttggaagtgggggcgggggcactgctaataccaggagacaggttagtcctggagccagtttcctggattccatctttgataagaataatcacaaagaggacaggaaaaaagaagtccaaactcattgagactaggaataatcggggcagccacactggaaattctaaggtctcacctgagcaaggtcagtctgcagccagaatacagagggccaacactggtgctcttgaacaagggcttgagctgttggggagggagagggaggtgagtggcagggctgaagaagtagaggcacggcagaagtgaggtgggtggggctggctgtagttggtggagctgacatcagtaggttgtatggggcttttatctcttggggtgaggggaggtgggtgagatcttccatggccatataggtgacataggtgggactaggtaaggtggatagggcagagtgagataggtggggctcttaccagaccctgcagaacactctccgtgatgttgaacttcctggagccagggtgacccatgttctcctcatactgtaggttagtgatggtgaagttgagtgtgaatggcaccaggagagggccggtggctatagtgaaggtgggaaataaacactatgttcaaaagtagagaaaatttaagagtttgcaatagacttatttctaaacatatgcaacaggatttaaagtgagtgataaaacataatgttttcatgcctcctttgactattatgatagctgttcttgagagagcacattaaatagtagttagaggctgagcataggtcttggtgcatattcagtgttccatagtgccagatactatctagtgccgttgttaacaccaccttcattttcaacatcaccatgattgtctccatgagtattattatcatcaccaccatcagcaccaaccccaacaccaccaccaccatcatcattatcaccattaacaccacaaccatcatcatcccaatcatcacctccatcaccattatcatcatcaccatcatcactgtcaatatcaccatgattgccaccatcagtagtattattgtcatcatcaccaccaccatcatcatcatcatcatcacataaacagaagctcactgagggcagagatgtttttactggttttattttccttgctgtatccctagggtctggtacactgtaggtggccaattaatttttttggttcactcactatcactagacttattatgattttctatctttatttgaatgaaaatggcacagacgtttacatcaggcatgctctaacagagatgccattgactggtacttacttgtggggctggggacgggggatggagtccctgaggttccaaggtcaactgtggaagtccaaggagctgagaaaaagtcctcatcagtgaaagcaggaagcactctcatgacagaaatggcaagaggggagactatggggtccgctgcctgtgtggctagagatgggtcagtctttggagctggggcagagcagagcttgagtaactgctgccctcttatctcctttgctgaagaagaggacctatgggtttatgaggaggagtagctcctgttccgcttggtgtagaatcaggggcatgtggacatgagttgaatactcactgctggtggtgagcccagagctccgatgggtgaaacctgcatagggaaggaggcaggagagtgcgtaagggttaaggagacattggcaaccaaataggggtcaaggctaccctggtgcaaaggaatgaatttcatggtacggggcatttgaagatttcctatcagcatcctcatatcagcaaagaatgccctgagggaacacaatctacggtgataaagaaactatgaagtccagaacttagtcatcccatgtaaaacaagtgacagaattttcaattgccaggcaggaagtgtgacctctagttagagattagctgctgctcagcaaggaggaagagacttcaaccacatcacagccactcaccattgacgtagagactgttccggtccagggtgtaggggcccagctctttgatgccattggtcatctggctcagctgccagtacagctgctccctgtccagtccagggctttgagggttaaggtggtgggtgcagatggcatccactccagtggctgccccatccttctcagacctggggaaggtaggtggggagaatgacaatgaaaagattacctaggatgggtcttgagattgctgagagaaggacggcaaggaaccagaggatatgagaaacctgggaaagaggtgagaagccacacttagattctctgagtgcgcagactactggcttgttagagactgtgagcagagtcatgaatacaacagttttgataaaagtgcaaggtgaggctgggtatggtgtctcacgcctgtaatcccagcactttgggaggccgaggcaggtggatcacctgaggtcaggagttcaagaccagcctgaccaacatggagaaaccctgtctctactaaaaatacaaaattagccgggtgtggtggcccatgcctgtaatcccggctactcgggaggctgaggcaggagaatcgcttgaacctgggaggcagaggttgcagtgagccgagattgtgcgattgcactccagcctgggcaacaagagtgaaactctgtctcaaaaaaaaaaaaaagtgcaaagtgaattctgcattctcatggcatggggacaggagagcccagacttgaggccagtgaagagctggaaatgaggatgaaagcacgtggctgaggcatgattgtcttgagagaaatcctggggacagaatttaacacctaaatgaaagggaggggcagggaaaggagggaattcagagtgatgaccagggtaggggctcaattctgatgatggacaatgcagattctctctgttgaggtggagtgtgggggtgttactatcaggagacacactggtcctgaagccagtgactgctgaaacccacctttggtgaggatatctctaggaagtgcagcaaggaagcagtgcaaagccttttggagtgagaataattgggacagctaggctggctattctagcctcacctgagagagatcagtctgcagccagagtacagagggccgacactggagttcttgaacaagggaccaagctgtggaaaagggacagagagatgagtaggagggctaaggtccctgtgtgtgggtgcagaaataaggtgagtgaggcagggcctagtgggtgaggctagcttcagtgggcgtggctggcctcagtgggtgagtcttgcatctctgggggcaaggacgaagtgggtacattcttctcccattaccctggcttggatgttgtaggagggactgagtatcttggtcagggcagagtgaggagggcagggcactaaccagaccctgcaggaccctctctgtggtgttgaacttcctggagccagggtgacgcatgtcctccccatactgcagattggtgatggtaaagttgagggtgaacggcaccaggagaggaacagctgctgtagtgggagggggaaataaacactatgttcaaaggagagaaaataggagtttgcaatatagttatctttaaatataggcagtatttaattgactgacaaaataaatatttaccatgcatcccttgccttcaatgacagaatttattttttaaaggatattatataaaatagtagttagatgctgagcatagctcttggttcatattcagtgctcaatattctctgatgttacctgttatctttattattgccatcatcatcattgctatcattgtcacaatcacaatctttattatcaccaccatcataataatccccaccatgaccaccacaagcatcatcatcaccacactcaacacatcactattatcatcataaccccatgaccatctctggcatcatcctcaccaccatcaccagttattgtcatcaacatcaccagtttcatcatcatcatcataaatagcaccaccaccaccaccatcatcatcactaacatcataaccgtcactgacatcatcttcatatccatcatcatcatggtcggcaacatcaacaccattatcatcaacagcatcactatcatcatcatcatcatcatcatcaacagcaccaccaccatcatcaacagcattaccatcatgatcattaccatgatcatgatcatcatcatcatcaacaactagcaccaccaccactatcatcatcacatgaataaaaaagctcactgagggcagagacatttttattggttttgttttccttgctgtatcccttgggtctggtacacagtaggtggccaacaaatatttttggttcactcactattaccagatttactataattttacatctttatttgagtgaaaatggcagagatgttcacactcatcaggcatgctgtaatagagatgtcattgactggtacttacttgtggggctggggagggaggatggagtccctgaggtcccaaggtccactgtggaggtcccaggagctgaggaaaagtcctcatcagtgaaagcagaagcactctcatggcagaaatggccaaacaggggactattatgaggtctgctgcatgtgggcatgagctgggcctgtctttggagctggggtggaagggagcttcaataacttcagccttcccagctcctttgctcatgaggaggacttatgggtttatgaggaggggcagcttctgctgtgcttggtgtaggatcaggggcatgtggacttgagttgaatactcactgctggtgggggccacagagctccgatgggtgaaacctgcatagagaaggagggagaaaattgtgtaaggattaaggagatgtgggggatgcaataggggtcatggctatcctggtgccatgggacagggaccattaaaagtttcctatcggcatcctcacaacagagaagaatgccctgagggaatgcagttcacgatgacgaagaaaccatgaagtccagaacttagtcatcccatgtagagcacataacagaattttcaatggccaggcagagagtatgcccccaagccagagattagagtctgctcagcagggaggaagagactccaaccacatcacatctgttcaccattgacatagagactgttcctgtccagggtgtaggggcccagctctttgatgccatgggtcagctggctcagctcccagtacagctgctctctgttgagtccagggcttttggggtcaagacggtggctgcagatggcatccattccagtggctgccccattcttctcaggcctggggaaggaaggtgggaggaatgcaatcaaaagattaactaggaagggttttgagattgctgagggaaggactgcaaggaaccagaggaaatgagaagtctgggaaagaggtgagaaatcacacttagattctctgaatgcaccgactactggcttgctttgaactgcaagcagggtaatgaatacaagaatttttatgaaagtgcaaagtggcttggcacagtgcctcatgtctgtaatcccagcactttgggaggccaaggcgggcagatcacttgaggtcaggagttcaagactagcctggtcaacatggtgaaacccagtctctacaaaaaatacaaaaatttgctgagtatagtggtgggtgcctgtaatcccagctacttgggaggctgaggcaggagaatcacttgaacatggaaggcggaggttgcactgagctgagaccagcctggtgtgcagtaagactatgtttcaacaatgaaataataaaataaaataaaataaaataaaataaaataaaataaaataaaataaaataaaataaaataaaataaaaaagtgcaagttaaaacctgcattctcatggcatggggacagagacaccagacgtgagaccaatgaagagctggaaatgggcatgaaagcctgtggatgaggcacgatcatcttgagagaaatcctggggacagaatttaagacctaaaggaaagggaggtgcagggacaggagggaattcagagggatgatcagggtagaggctcaatcctgatgatgggccattcagattctccctgttgaggtggggtttgggggtgttactatcagaaaacacattggtcatgaagccagtgactcctgaattccacctttggtgaggatatccctaggaagtgcagcaaggaagcagtgcaaagtcgattggagtgagaacaagtggggcagccaagcttgatcttctaaggtctcacctgagcaaggtcagtctgcagccagagtacagaaggccgacactggtgttcttgaacatgggaccaagctgtggaggagggagaaggagatgagtaggagggctaagttgcgtgtgtgggtgtgtagggcagaagtcaggtgggcagaacaggcatcagtgagtggggctggtttcaatgggcatggcttgcatctcttggggcaagggtgaggtgggtatgatcttgttccatcacctggcatggatgatgtaggaggtactgactctctggggtggggcggagtgaggagggtggagcactaaccagaccctgcaggacccgctccgtggtgttgaacttcctggagcctgggtgatgcatgtcctcctcgtactgcaggttggtgatggtgaagttgagggtgaatggcaccaggagagggccagcagctgtagtggaggtgggaaacaaacactatgtccaaagtagagaaaataggagtttgcaatagacttatctttaaacatatgcagaatttaaattgagtgacaaaatatttaccatgcttcccttgcctaaaacaatacaatttatttttacaaaaatatattatataatagtatttagatgctgagcactcctcgtggtgcatattcagagctcaatattgtctgatgttatgtactatctttattgccatcatcatccttgctatcattgtcaccatcaccatcattattatgaccatcactgccatagtaatgcccatcacgaccaccacgaacattatcatcaccacattcaacacatcatcatcatcataaccccacaccatcactggcattatcctcatcaccatcattgtcattgtcatcaacataaccacgaccaacatcaatatcatcggtaccacggtcagcatcctaaacagcatcaccacagtcatcatcatcatcacacttaacacatcatcattatcatcataatcttcacgaccatcacggacaatatcctcaagtccatcaccatcatcatcagtaatatcaccaccgccatcatcaacagcatcaccatcatcaacagcatcaccatcatcaacagcatcaccatcatcaacagcatcccactcaacatgtcattattactatcataaccaccatcactatcatcgtcacatgaacacaagctcactgagggcagagatgtttttattggttttattttccttgctgtatccctagggtctggtacaatgtaggtggccaatacatttttttggttcactcagtatcactagatttactatgattttccatcttcatttgagtgaaaacggcacagatgttcatattcatcaggcatgatctaatagacatgtcattgactggtacttacatgtagggctggggagggaggatggagtccctgaggtcccaaggtccactgtggaggtcccaggagctgaaaagagtcctcatcagtgaaagcagaaagcactctcatggcagaaatggaaagagggtagactattataaggtctgctgcatgtgggcttgagctaggactgtctttggagtaggggcagaggggagcttgagtaacttctgccttcctagctcctttgctcaagaggagttcttatgggcttaagaggaggggccagctcctgctccacttaatataggatcaggggcatgtggacatgagttgaatactcactgctggtgttgggcgcagaggtctgatgggtgaaacctgcgtagagaaggagggaggagactgggtaagggttaaggagatgtgggagatgcaatagggttcagggctaccctggtgcaattaaatgagtttcatgggatggggccattaagatttcctatcagcattctcccaaaagggaagagtgccccaagggaatgcagttcatgatgatgaagaaaccatgaagtccagaacttagtcaccccatgtagagcacatgacaaaattttcaatggccaggcagggagtgtgcccccaagccagagattagaggctgcccagcaaggaggaagagattcctaccatattgcagctcctcaccattgacatagagactgtttctgtccagggtgtagggacccagctctttgatgccattggtcagctggctcagctcccagtatagctgctccctgtccactccagggcttttggggtcaagacggtgggtgcagatggcatccactccagtggctgctccatccttctcggacctgaggaaggtaggagggggaatgacaatgaaaagattgcctaggacttgtcttgagattgctgagggaaacatatcaaggaaccagaggaaatgagaaatctgggaaagaggtgagaatctgcacttagattatctgagtacatagaccactatcttggttgggactgcaagcagagtcatggatataataatttttataaaagtgcaaggtgaaacctgcattctcatggcatggggacaggagaacccagacttcagactagtgaagagcttgaaagggggatggatgtatgtggatgaggtatgattgtcttaagagcagtcctggggacagaatttaacactaaatgaaagggaggggcaggcaaaggagggaatacagaggagtgatcagggtagtgcctcaatcctgatgatggatcacgaaaattctgcctgttgaggtggggaatggtggtgttactatcaggaaacaactggttctcaagccagtgactcctgaattccctttttggtgatgatatccctaggaagtgcagcaaggagacagtgcaaagtcttttaaagtgagaacaattgtggcagccaagctggctcttctaaagtctcacctgagcaaggtcagtctgcagccagagtacagagggccaacactggtgttcttgaacatgggaccaagctgtggaggagggagagagaggtgagtaggagggctaaggagtgtgtgtgttaggggcagatgtgaggtgggaggagtaggcaccaatgagcagggctggtctctgtgggcgggacttccatctctcaggggcaggggtgaggttggtgctatcttctttcatcaccttggcatctatgatgtagaagggactggatatctggggctggcagagtgaggagggaagggcactaaccagactctgcaggactctctctgtggtgttgaacttcctggagccagggcaatgcatgtcctcctcgtacttcaggttggtgatggtgaagttgagggtgaacggcaccaggagagggccagcagctgtagtgggaattgaaaataaacactatgttcaaagtagagaaaataggggtttggaatagacttatctttaaacatatacaaaatttaaattgagagaaaaatatttatgtctcccttgcctataataatacaatttatttttataaaaatatattatataatagtagttagatgctgagcatagctagttgtgcatattcagtgctcaatattgtctgatgttatctgttatctttattatggccataatcattgttgctatcattgtcaccatcaccatcattattatcatcatcaccatgataatccccatcatgatcaccacaaacataatcatcaccacactcaacacatcatcattatcataataaccacatgaccatcactggcatcatcctcatcaccattattgttattgtcatcaacgtcaccactaccatcatcaacaccatcagtaccatggtcaccatcatcaacagcaccaccaccatcatcatcatcatcacactcaacacatcattaccatcataaccttcacaaccatcactgacaacatcctcatgtccgtcatcatcattgtcagtaacatcaccaccaccatcatcaacagcaacaccataatcataaattatcatcaaactgaatatgtcattattactattaccaccaccaccaccatcatatcatcacatgaacacaagctcactgagggcagagatgtttttattggttctattttccttgctatatccctagggtctggtacactgtaggtggccaatacattttttttggttcactcagtatcactagatttattatgattttccattttcatttgactgaaaatggcacagatgtttgcattcatcaggcatgatctaatacagataccattggctggtacttacttgtggggctggggagggaggatggagtccctgacccaaggtccactgtggaggtcccaggagctgaaaaaagtcctcatcagtgaaagcagaaagcactctcatggcagaaatggcaagaagatagactattatgaggtctgctgcatgtgggcttgagctgggtctgtctttggagctggggcagaggggagcttgagtaacttctgccttcccagctcatttgctcaagaggaggacttatgggttaaagaggaggggccagctcttgctccacttgatgtaggatcaggggcatctggacatgagttgaatactcactgctgctggtgggcacagggatccaatgggtgaaacctgcatagagaaggagggaggagactgggtaagggttaaggagatgtgggggacgcgatagagttcaggactaccctggtgcaattaaatgagtttcatgggacaggggtcattaaagatttcctatcagcatcctcacaacagggaagagtgcccagagggaatgcctctcatgataacaaagaaaccatgaagtccagaacttagtcatcccatgtagagcacgtgacagaattttcaatggccaggcagggagtgtgcccccaagccagagattagaggttgcacagccaggaggaagagacccctaccatatcacagctgctcaccattgacatagagactgttcctgtccagggtgtaggggcccagctctttgatgccattggtcagctggctcagctcccagtatagctgctccctgtccactccagggcttttggggtcaagacggtgggtgcagatggcatccactccagtggctgctccatccttctcggacctgaggaaggtaggagggggaatgacaatgaaaagattgcctaggacttgtcttgagattgctgagggaaacatatcaaggaaccagaggaaatgagaaatctgggaaagaggtgagaatctgcacttagattatctgagtacatagaccactatcttggttgggactgcaagcagagtcatggatataataatttttataaaagtgcaaggtgaaacctgcattctcatggcatgggaacaggagaacccagacttcagactagtgatgagcttgaaaggcggatgcatgtatgtggatgaggcatggttatcttgagagaaatcctggggacagaatttaacacctaaatgaaagggaggggcagggaaaggagggaattcagatgggtaatcagggtagtgtctcaatcctgatgatgaaccatgaagattttgcatgttgagttggggcatgggggtgttactatcaggaaacaactggttctcaagccaatgactcctgaattccccttttggtgaagatatacctaggaagtgcagcaaggaagcagtgcaaagtcttttagagtgggaacaagttgggcacccaggctggctcttctaaagtctcacctgagcaaggtcagtctgcagccagagtacagaaggccaacactggtgttcttgaacataggaccaagctgtagaggagggagagggaggtgagtagtggggctaaggtgtgtgtgtgtcggggcagatgtgaggtgggtggagcaggcaccaataagcaggactggtctctgtgggtggggcttgcatctcttggggggaaggggggaagttgttgctatcttctttcatcaccctggcatggatgatgtagaagggactggatatctggggctgggcagagtgaggagggaagggcactaaccagagtctgcaggaccctctcagtggtgttgaacttcctggagccagggcgatgcatgtcctcctcatacttcaggttggtgatggtgaagttgagggtgaacagcaccaggagagggccagcagctgtagtgggaattgaaaataaacactatgttcaaagtcaagaaataggggtttagaatagacttatctttaaacatgtgcaaaatttaaattgagaaacaaaatatttaccatgtctcccttgcctataataatacaatttatttttatgaaagtatgttatataatagtagttagatgctgagcatagctaatcatgcatattcagtgctcaatattgtctgatgttatctgttatatttatgatgactggccatcatgattgttgctatcactttcaccatcataaacagcaacatcatcatcatcatcacactccacacaccatcattaccatcataaccttcacagccatcactgacaacatccttatgtccatcatcatcattgccagtaacatcaccaccatcatcatcaacagcatcaccatcatcatcaatcatcatcacactcaacatgtcattattactatcataaccaccaccaccatcatcacatgaacacaagctcactgagggcagaggtgcttttattagttttcttttccttgtatctctaaggtctggtacactgtaagtggccaataaatttttttggttcactcagtatcactagatttactatgattttctattttcatttgagtgaaaatggcacagatgttcacactcatcaggcataatctaagggagatgccattgactagtacttacttgcggggcttgggagggagaatggagtccctgaggttccaaggtccactgtggaggtcccaggagctgagaaaaagtgctcatcagtgaaagcagaaaataatctcatggcagaaatggcaagaaggtagactattatgaggtctgctgcatatgggcatgagctgggcctgtctttggagctagggtggaagggagcttcaataacttctgccttcccagctcctttgctcaagaggaggacttatgggtttaagaggaggggccagctcctgctccacttaatgtaggatcaggggcatgtggacatgagttgaatactcactgctgctggtgggcacagaggtccgatgggtgaaacctgcatagagaaggagggaggagacttggtaagcgttaaggagatatgagggacacaataagggtcatggcaatcccaatgcaattaaatgagtttcatgggacaatgagtttcatgggactggggccattaaagaattcctatcagtatcctcacaacagggaagagtgccctgagggaacacagttcacgacaatgaagaaactgtgaagtccagaactttgtcatcccatctacaccacatgacagaatattcaatggccaggcagggagtgtgacttcaagccacagattagattctttccagactctagaaggaaaagactccaaccacatcacagctgctcaccattgacatagagactgttcctgtccagggtgtaggggcccagctctttgatgccattggtcagttggctcagctcccagtacagccgctctctgttgagtccagggcttttggggtcaagatgatggatgcagatggcatccactccagtggctgctccatccttctcagacctggggaaggtaggtggggagaatgactatgaaaagattacttaggttgtgtcctgagactgctgatggaaagacagtaaagaaccagaggaaatgagaaacctgggaaagaggtgagaagctacacttagattctctgagtgcatggactactggcttgcttgggactgtgcacagagtcacagatacaaccatgcttataaaagtgcaaggtgaaacctgcattctcatagcatggggacaggagagcccagacttgagaccagtgaagagctagaaacagggatgaaagcacttggatgaggcatgattgtcttgagagaaattctggggacagaatttaacacctaaatgaaagggaggggcagggaattccgagggatgatcaggatagaggctcaatcctgatgatggaccatgcagattctccctgttgaggtgaggtgtgggagtgttactatcaggaaacacattggtccagaagccagtgactcctgaattcccctttgggtgaggatatccctaggaggtgcagcaaggaagcagagcaaaatctactggagtgggaacaactggggcagccaggctggatcttctaaggtctcacctgagagaggtcagtctgcagccagagtacagagggccaacactggtgttcttgaatatgggaccaagctgtggaggagcgagaggaaagtgagtaggagggctaaggtgcatgtgtgtggggcagaagtcaggtgggtggagcaggcaccagtgggcatggctggcctcagtgagcagggcttgcatcttttgtgggcaagggtgagatggatacaatcttcttccatagccctggcatagatgatgtatctgggatggggcaggagtaaagtgggtggggctctcaccagaccctgcaggaccctctctgtggtgttgaacttcctggagccagggtgacccatgtcctccccatactgcaggttggtgatggtgaagttgagggtgaatggtaccaggagagggccagcagccataactggaatgggaaataaacactatgttcaaagcagagaaaataggagtttgcaatagacttatctttcaatatatgcagaatttaaattgagtgacaaaatattttccatgcctcccttgcctataataatataatttatttttgtaaaagtatattatataatagtagatgctgagcatagctgttggtgaatatttattgctcaatactgtctgacattttctgttaactttattatcatcatcatcaccatcaccatcattgtcacgtcaccatcattattatcatcatcaccaccatgataatccccatcatgaccaccacaaacatcatcactctcaacacatcatcattaccatcataaccccaccaccatcacttgaatcatccttatcaccatcatcatcattgtcatcgacatcaccaccaccatcaacatcaacatcaacactatcattatcatgatcattataaacagcaacactaccaccatcatcatcaccatcacactcaatacgacatcattaccatcacaacctccaccaccatcacctgcatcatcctcatcaccatcatcattgtcatcatcaccaccaccatcatcaagatcaccactatcatcattataaacagcaacactatcactattatcatcacactcaatacatcataattaccatcataacctcctctaacatcaccagcatcatcctcatcaccatcaccatcatcatcaacatcactactgccatcatcaacagtatgaccatcatcatcatcatcatcataaacaatgtcaccaccaccatcatcatcatcccactcaacacatcatcattaccattgtaactaccaccaccatcatcatcatcacaagaatacaagctcactgagggcacagattttttttaaattgattttctttttcttactgtattcctggggtctggtacacagtaggtggccaaaacaaatttgtcacaagcattcttatacaccaataatagacaaacacagagccaaatcataagtgaactcccattcataattgcttcaaagagaataaaatacctaggaatgcaacttacaagggacgtgaaggacctcttcaaggagaactacaaaccactgctcaatgaaataaaagaggatacaaacaaatggaaaaacattccatgctcatgggtaggaagaatcaatatcgggaaaatggccatactgcccagggtaatttatagattcaatgccatccccatcaagataccgatgactttcttcacaaaattggaaaaaactactttaaagttcacatggaaccaaaaaagagcccgcatcgccaagtcaatcctaagccaaaagaacaaagctggaggcatcatgctacctgacttcaaactatactacaaggctacagcaaccaaaacagcatggtactggtaccaaaacagagatatagatcaatggaacagaacagagccctcagaaataacgccacatatctacaactatctgatctttgacaaatctgagcaatggggaaaggattccctatttaataaatggtgctgggaaaactggctagccatatgtagaaagctgaaactggatcccttccttacaccttatacaaaaattaattcaagatggattaaagacttaaacgttagacctaaaaccataaaaaccctagaagaaaacctaggcattaccatttaggacataggcatgagcaaggacttcatgtctaaaacaccaaaaacaatggcaacaaaagccaaaattgacaaatgggatctaattaaactaaagagcttctgcacagcaaaagaaactaccattggagtgaacaggcaacctataaaatgggagaaaattttcacaacctactcatctgacaaagggctaatatccagaatctacaatgaactcaaacacatttacaaggaaaaagcaaacaaccccaacaaaaagtgggagaaggacatgaacagacacttctcaaaagaagacatttatgcagccaaaaaacacatgaaaaaatgctcaccatcactggctatcagagaaatgcaaatcaaaaccacaatgagataccatctcacaccagttagaatggcaatcattaaaaagtcaggaaacaacaggtgctggagaggatgtggagaaataggaacacttttacactgttggtgggactgtaaactagttcaaccattgtggaagtcagtgtggcgattcctcagggatctagaactagaaataccatttgacccagccatcccattactgggtatatacccaaaggattataaatcatgccgctataaagacacatgcacacgtatgtttattgtggcactattcacaatagcaaagacttggaaccaacccaaatgtccaacaatgatagactggattaagaaaatgtggcacatacacaccatggaatactatgcagccataaaaaatgatgagttcatgtctctgtagggacatggatgaaattggaaatcatcattctcagtaaactatcgcaaggacaaaaaaccaaataccgcatgttctcactcataggtgggaattgaacaatgagaacatgtggacacaggaaggggaacatcacactctggggactgttgcagggtggggggaggggggagggatagcattaggacatatacttaatgctaaatgacgagcaaatgggtgcagcacaccagcatggcacatgtatacatgtgtaactaaactgcacattgtgcacatgtaccctaaaacttaaagtataataaaaaaagtgaaaaggatgagaaaaaacaaacaaacaaatttgtccactcagtatcactagatttactatgattttccatctttatttgagtgaaaatgacagagatgtttacactaatcaggtatgctctcatagagatgtcattgactgatacttacttgtggggctggagagggaggatggagtccctgaggttctgagatccactgtggaggtcccaggagctgaggaaaagttctcatcagtgaaagcataaagcactctcttggcagaaatggcaagaggggagactatttatggggtttgttgcatgtgtagcttgagctgggtcggtctcttgagctgggcagagggacacttaaataacttctgccctcctaaatcctttgcttatgaagaggacttaatgggtttatgaggaggggccagctcctgctcctcttggtgtaggaaccgaggcatgtggatatgagttgaatactcactgctggtggtggacacagagctctgatgggtgaaacctgcatagagaaggagggaggagagtgggtaagagacaaggagaggtgggggaccaaatggaggtcaatgctaccctggtgcaatgaaccgagtttcatggtacagggacaattgaagattttctatcagcatcctcacatcaggaaagaatgccctgagggaacacagtccatgatggtaaggaaaccatgaagtccagaccttagtcatcccatgtagagcacatgacagaattttcaaaggccaggcagggagtgtgatctctagttagagattagaggctgcccagcaagggggaagagatttcaaccacatcacagccactcaccattgacatagagactgttcctgtccagggtgtaggggcccagctcttcaatgtcattggtcagtttgcttagctcccagtacagctgctccctgttgagtccagggcttttggggtcaaggcggtgggtgcagatggcatccactccagtggctgccccatctttctcgggcctggggagggtcagtgggaaaaatcacaatgaaaagtttatctaggaagggtcttgcgattgctgagggaaggacagcaaggaccagagaaatgagaaacctgggaaagaggtgagaagccacatcgactcttagtgcatggactattggcttgctgaggactgtgagtggagtcacggatacagtgacaagatgaaactgacactttcatggacgggacggggagccggacttgagcccagtgaagagctcgaaatgaggatgaaatcacgtggataaggcatgattgtcctgaaagaaatcctggggacagaatttaacatgtaaaggaaagggaggcacagggaatggagggaattcagagggatgataaagggagaggctcaatcctgatgatgggccatgcagattctctctgttgaggtggagtgtaggggtgttactgtcaggaaacacactgatcctgaagcctgtgactcctgaattccacctttggtgaggatatccctaggaagtgcagcaaggaagcagtgcaaagtcttttggagtgagtacaagtggggcagccaggctggaaattctaagttctcacctgagcaaggtcaatctgcagccagagtacagagggccaacactggtgttcttgaacaagggcttgagctgtggaggagggagagggcagtgagtaggagggctaagttttatgtaagagccaggcagaagtgaggtgggcagggctggccttggtgggggaggcttgcatctctctctttttttcttttttttgtgagatggagtttcgcttttttgcctaggctggagtaaagtggcatgatcttgactcactgcaacctctgcctccttgattcaagtgattctcttgcctcaccctcccaagtagctgggattacaggcatgcaccaccatgcttggctaatttttgtattttagtagggatgaggtttcactatgttggccaggctggtcacaaactcctgacctcaggtgatccacccgccttggcctcccaaatgctggtattacaggcgtgagccaccgctcctggctgaggcttgcatctcttggggcaaaagtgagttgggtttgatattcttccattgccctggcatggatgatgtaagagggactgggtatcatgagcagggcagagtgtggagggcaggacactaaccagaccctgcaggacactctccatggtgttgaacttcctggagccagtgcgacgcatgtcctcctcgtactgcaggttggtgatggtgaagttgagggtgaacggcatcaggagagggccagcagctatagtgggagtgtgaaataaacattatgttcaaagtagagagaatagcactttgtaataaccatatgcagcaattaaattgagtgacataataaatattttccacgcctttcttatctatgatacaattcattttctaaagtagattatataatagtagttagatactgagcatagctcttggtacatatttagtgctcaatattgtaaggtgatatctgttatctttattatcaccatcaccatcatcactatcattgtcatcattattatcattattgtcatcacaagtaccaccagcaccaccatgacaatccccatcatgaaccacaaatatcatcatcaccatcatcacattcaacatatcattaccatcataaccccaccaccatcaccgacatcatcctcatcaccatcattgtcactgtcgttgatatcaccattaccatcatcaatgtcactagcataataatcatcatcatcatcaacaccaccaccatcatcgtcacactcaacatatcattattaccataataacccccaccaccatcaccagcatcattttcttcaacatcatcatcatcatcattgtcatcaacatcactatcaccatcaacagtatcaccagcatcatcatcatcatcatcatcatcatcgtcatcaacagcaccaccaccaacatcatcatcatgacaagaatacaagctcactgagagcagaaattttgtattggttttgttttccctcctgtatctctaggatctggtacacactaggtggccaacaaatttcgttggtccactcactatcagtagatttgctatgattttccatcttcatctgagtaaaaatgacagagatagcatgctctaatagagatgccattgactggtacttactcgtggggctggggctggaggatggagtccctgaggttcccacatccactgtggaggtcccaggagctgaggagaagtcctcattagtgagagcagaaagcattaccatggcagaaatgccaagaggtgagacttttatagggtttgctgcatgtgggcttgagctgagtctgtctttgaaactggggcagaggggagcttgaataacttctgccttcccagctactttgctcaagaggaggacttatgggtttatgaggaggggcagctcctgctttgcttggtgtaggatcatgggcatgtggacatgagttgaatactcactgctggtggtgggcatagagcttcgatgggtgaaacctgcacagagaaggagggaggagtgtgggtaagttacaaggagatgtgggggaccaaataggggtcagggctaccctggtgcaatggaagcagtttcatgcagcagggaccattaaagatttcctatcagtgccctcacatcagggaagaatgccctgatggaattcattccatgatgatgaagaaaccatgaagtcctggccaggtgtggtggctcaagcctgtaatcccagtactttgggaggccaaggcaaggtggagtagaaggtcaagagattgagaccatcctgaccaacatggtgaaaccctgtctctactaaaaatacaaaaattagctgggtgtggtggcatgcacctgtagtcccagctactcaggaggctgaggcaggagaattgcttgaatccgggaggcggaggttgcagtgagctgagatcatgccactgcacctcagcctggtgacagagcgagactccatctcaaaaaaaaaaaaaaaaaaaaaaagataccatgaagtccggaaattagtcatcccatgtagagcacaggaccaaattttcaattgcctgacagtgagtgtgacctcaagccagtgattacaggctgctcagcaaggaggaagagcctccaaccacatcacagctgctcaccattgacatagagactgttccggtccagggtgtaggggcccagctcctggatgccatttgtcagattgctcagctcccagtacagtcgctctctgtccagtccgaggtcttcagggtcagggcgatgtgtgcagatggcatccactgccgtggctgagctatccttctctggcctgggtaagaacctacatatgcttagtccatccacctctccatccttttgtccttcctttccactctttgtcaacccctaatgcagactctgagaaaattgtggttaacaagaatgtggctctcaggctaggcatggtggctcatgcctgtaatcccaacactttgggaggccaaggcaggtggatcatgaggtcaagagattgagaccatcctggctaacatggtgaaaccccgtctcaactaaaaatacaaaaattagctgggcatggtggtacgtgcctgcagtcccagctacttgggaggctgaggcaggagaattgcttgaacctaggagccaaaggttacagtgagccgagatcgcgccactgcactccagtctgggcaacagagtgagactctatctcaaaaaaaaaaaaaaaaaaaaaaaagaatgtggttctcatcagagagatgcccaccataaacaaattactaggattattagtggaagcagaaagcattaccatggcagaaatgccaagaggtgacacttttatagggtttgctgcatgtaggcttgagctgtctgtctttggaaccggggcagaggggagcttgaataacttctggccttcccagctgctttgctcaagaggagggcttatgggtttatgaggaggggcagctcctgctttgcttggtgtaggatcctaggataataatgccagggatctgcatggccccgaataagcctcctgaagtactaggtgtgcgacagctatacttagggttaatctgtaatccatggcagtggcccttgtactggtgcacgtagcagtggccctcctactggtgcccatggcatggcgttttcaaatggtgggatcagaaggttcaagtcatcctctctagatcctatggaccagcagggctaggagatttgttatgagactcaagggagctaaatggcttggggaaaatgccctttttggctggtccgtctgaaactgtggctggtccaacatgcagtcagaaggtcttcatgtctcagcacctgttcccggccacaggatgtggactcacctacctagccacccactattgagtgattagagggaaacgggctctttccctatgtcccagggttgtgagtagctctatagtaggaacgactttatagtaacaactaccatttattaaatacttcctatgcagcaggcccagcattttgtattcataatcacatattttcatcctcaaacatccctatgggttggtactgctcaattccccaagtcagtactatactaattatattatgtataacacaattgtatataacataaaatatataaaatgtagatctgtaaatataaacttaatatagaaatatatgatatcgttttgcattttatacattactatattatatagtatatacaatatatattattatacctctacctaacatatattaaactggtttatatataactattttatataattatataactctataactattatataactattttttatataactaccatatacctctacttaacatatattaaactggtttatatataactattgtatataactatataactatttttatataactaccatgtacatttagatgcttcttgactcatgatggtattatgtcctgataaacacaggttttttattttatttttttgtttttgctttcttttgtttttggagatggagtctcactctgttgcccaggctggagttcaatggtgtgatcttggctcactgcaacctctgcctcccaggttcaatccattctcctgcctcagcctcccgagtagctgggactacaggtacccaccaccacatccagctaatttttgtatttttagtagagatgggttttctccatgtttgccaagctgatcgtgaactactgacctcaggtgataaacctgcctcagcttcccaaactgctgggattacaggcatgagccatgcacccagcctgttttttgttttttggagacaagagtcttgctctgtcatccaggctggagtgcggtggtgtgatcttgactcactgtaacttccatctcctaagttcaagtgattctcacgcttcagtctcccgagtagctggaactacagttgtcacaccacgcctggctaatttttgtatttttagtagagacaagattttgccatttggacagcctggtctcaaactcctggcctcaagtgatccacctgcctcagcctcccaaagtgctgggatgacaggtgtgagccatcatgcccagccctgacaaatccattgtgaactgaaaatgtcataagtcaaaaatgccctgtagccgggcgtgatggctcacacctgtaatcccaggattttgggaggccaaggtgggaggattccttgagcccaggagttcaaggccacctgggcaacatggcaagaccctcctctccacaaaaaaaaaaaaattaaaaaaaaaatagccaggtgtggtggcacacacctgtagtcccagctactcaggaggctgaggtaggaggatcacttgagcccaggagttcaaggctgcagtgagctatgatcgcaccagtgcattccagtctgggtgacagagcaagactctgtctcaaaaataaaaataaaaataaaaatcgactatacctaacctacagaacatgataggttagcctatcctaccttaaacatgctctgaacccttacattagcctacatgtgggcaaaatcacctaacacaaagcctattttataataaactgttgaatatctcatataatttattgaatattgtactgaaagtgaatgacagaatggttgcatgggtgttgaaggtatgctttctactgaatgcatattgctatggcattatcacaaagtttgaaaaatcataagttgaatcattgtaattcatggactgtttatatatagaatatatactaggtatatgtagaagttgtatgtatccacatgtatactatatataatatatatttaaatattacatgtatttatacttatatactttaatatattatatatacacattatattatacatgatatacgttatatgtaatatatataatatgtcatattataacatatgttatatgttaatgtcagatatgttatatacatcacatacacatatatgttatatacattatatataacatataagttatacatatgttatgtatgtatatattacattatatataacaatacataatgtatatgttatatgttgcatataatacgtaacaaatacaatgtatgcattatatataacaattatgtataatataattatatataatatatcatatataacatacattatatgtaacataatgtatattaaactgatttataaaatattatgtatatgttacatatgacagtataagttataacatataatattgttatattataacatatattatgttataacatataatattgttatatcatatgttatatgttaatgtcagatatgttatgtacatcacacatacacatatatgttatatacattatgtataacataaaagttatacatatgttatatatgtatatattatattatatataacaatatataatgtatgttatatgttgtatataatatataacaattatataattatatataacaactatatattatatataattatatataacagttttatataatatataattatatataatatatcatatataacatatacattatatgtaacataatgtatgtgttatatataacttgtactatatatgctataacatatataacatgtatacaatataacaatatgtataatatatacattatatataacatatgttatatacgtatataacatatgcatataaaaatgtgtctataaacatgtttataaaatatgcctcaatatgtatataaaatatgtctatatataatatatgtattttatatatataatatgtcaggaaatagggcacagaaggcttcaggcacttgctcagagtcacagatagtaaatggcagagctgggttggttcagaactgaggtctgcctgagttcaccaatgctcttagccactagggcccccctgtcccctcttccccctgggaaggaaaggaagctggaggtagatgactgacactctctcttgggagagccacacttggagattctgtgagagaggtgtggaaggtgagaatgccaggcaggaaatgatatcaaccgctgtctaccctaaaagacctgccctttccagcactcagggacagtgccctcggtgcctctcagtcaccctcagaccggccaggccctctgtggctgcatctgagccactcaggagctgacctcctgcctgtaagggctgaacgccttcctttcctcccctcttagattctctgggcaagttcccttagagggaagtcagattggggttttccacatgctgcaagttcataatgggggcagaggaggaagtgccacctaagggataggagtttggatatagaacctgaagtgctgcagttgctttgtgtgtcctggcacaagccacttaatctgggcctcagtttccccttctgctcctgcttcatgaggctgttgcaagcactgatgaggcattaaatataaagtacataatgcagtgccttgggtcttaggaatagttatctgctgctgctggtggtgatgcttagtatccatgggcaatagttgttccaagtatgaacagagtcagggagcccagagactagggtcatattcacctgttgggctgtgtttttcttaaggagcgtctcacctgagtgaggctagtctgcagcctgaatagaggtattccagactgctattcctgaacaagggtttgagctgcaaggaaggagaggggaggtgagaaacaacagctgcgggaagccaggaagagtggggcattggaggggtggaccagggtgaggtgggcgtggctgaaatcagtgggcggggcagggaaaggtgggcgtggctggcatcagtaggctgggtggggtgaggtgggcttggctaaaatcagtgggtggggcagggaaaggtgtctggggttggatgaggtgggcgtggctggcatcagtgggcgaggcagtgtgaggtgggctggtttgtctaagtgggcgagggaggagtacggtgggcggggctctcaccagaccctgcagttctctctctgtggcgttgaacttcctggaaccagggtgccgcatgtcctcctcgtactgcaggttggtgatggtgaagttgagggtgaatggcaccatgaatgggactgtggctgctgcaaggaaggagaaaagaaggccacgcctgagtcagatctgaactgactgtaagtcaatttctgaggacccagacggagtgcttgaagcaagagtctgaagcagacaggtgggtgctttagtttggacggataatggaaagccaggtaaggagaaaagtgggatgttcctaaaatgcattacctgggcccagaagcaggttaggggaccagaagcaggttaggggaccagggtaggtgtattgggtcagaacgtgtgcctactggaagctgaggtctcagactctgccaggtgcccatacccgccctaacaaactctagctgagaagttaaaagggaaaaggaccggaacagtctcatgctttggggaacaagaagggaaaaaagagtcaactcaatcccattgaacactgaacaacaacaataaaaatcaaacagcagtccttaaagcagaccttctctcacctgctttacttggctacccttccccactcaagcccaaaactcccaaaactcccagaacttgcccttcctttaataaagaggagaccacatggtagagagacatagttaccatggttacggccacactagtgagtcagatttggtttcaaatctcctctctgcccctcaccagccaagtgaccatggacatgttacctgtccatacctcagtttcttccgctgtaatacaatgggcaatatgggtcgggcgcggtggctcacacctgtaatcccagcactttgggaggccaaggcgggcagatcacttgaggtcaggaattcgagaccagcctggccaacacaatgaaaccccgtctcgactaaaaatacaaaaattagccaggcgtggtggcatgcacttgtaatcctggctacttgggaggctgaggcaggggaatcccttgaacccgggagacggaggctgcagtgagctgagattataccactgcactccagcctgggcaacagagcgagactctgtctcaaaaaaaaaaaaaaaaaaaaaaggcggcgaggggcataatgatattttggagggaaattaggaaggttacatgactgttaaaaagagcacatctccagggcattacactgagtggaaaagaagccaatttcaaaggtgacatgttgtacatttccatttatataacatcttcaaaagaaaattgtagagacagagatggagatggagagtagaatagctattctatgcaatagtgttgggctcagtgggcatgattacgaaggctagcatgaggggaatctttgggggaatggaacagttctgaatcttgatggtggtggtgattatagggctatgcccatgtgataaaaattgcatagggctaccaacacacacgcacacacacatgcatgcacacacgtgcacagacacacacacatgtgcatacatgcacacagatgcacgcacgcacgcacgcatgcacacacacatgcacacatgcacacacgcatgcacacatgcacatatgcacacacaggcgtgcatgcacacacatgcctgcacacacacgcacatacacaagctcacatatgcacacacgcgtgtaaaaccagtaaaatggattttaacaatgtcagtttcctgcttttgatattgtattagagttatgtaagatgtagccattggggagaaactgggtgaaggatacaggggaatgctacactattttcgcaacatctcctgaatttatttattatttatttcaaaatgaaaagttatttattatttatttatattattatttactttatatttattatttatttcaaaatgaaaagttaaaaataaaaaaaatacatagcatatggcatgccatatagtaagtgctcaataacttggttgtcttttattgtcaattgtaattgcttgttccatttcagtcttgcccaatacactgtaaacttggtgaggggagggactgcatttgacttagtcaacatcttatcccccctgcccagcccagaataggtgcctgataaatatttgttaaaccaaattccctggtagcccctgtgctaggtgttcttacgtagagttgcatataacatttgcaaacaatttatgaaatattattatcctcaattggcaggtgaggaaactgaggtactgagaggatgagtaaattgctcaaagtcaacatggctggagaatgaggaggacccttctcctgctcttgaggagttcggagcagagcgaggattaccatgactgctccaggtttcctcacgccatcctttaccaacatctcccagttatatatataatgtgtataactatatatatagaaatatatatatttatatacagagaaacatacatatataactatatatagttacagatatagaaactatatatataactatatatagagagacactatatatatatgttttatatatgtggttactatatggtaactatatatatggttatatataactatatatatggctatatatagttatggctatataaataactatatataacatatatgttatatgtataaccataaatatatttttatataacatataatatatgatataacatctatctatctaaccaagtagaaactttcgaactgaaacataaagtaactgagataaaaagaattcaatggatgggcagaatggagctggtagagaaaaggcttggtgattgtgaaaatattctataaaaattattaaacctgggccgggcgcagtggctcacgcctgtaatcccagctctttaggaggctgaggcgggcggatcacgaggtcaggagattgagaccatcctggctaatacggtgaaaccccgtctctactaaaaaatacaaaaaattagccgggcatggtggcgggtgcctgtaatcccagctactccggaggctgaggcaggagaatggcgtgaacccagggggcggagcttgcggtgagccgagatcgcgccactgcactccagcctgggcgacagagcgagactccgtctcaaaaaaaaaaaaaaaattattaaacctgaaattcggagaggaaaaaagattgataaataacaaaatgaacagaacctcagggtctcttcgggcaacatcatttcattggaggtccgaaggggagaaagaatcagagcagaaaataaacactttgagactcaagaagctgagaacactttaagcaggataaactcaaagaaaaccatgcccagacacatcgtaatcaaactactgaaaatcaatgatgaagaacaaattttgaaagcacctagaaaaagtgacagcattgatcatggaatgacttgctttgtaatacatgttacatacgtacaagcccagaggggttaggcatgtcacataaatggttgaattgattagagcagagcagtgaggaagtggagagtgaacatcctgtctacagcatgtaaaaagtttgcagtgttgtgactcacaaaacataaggcctgaaggcggaattttaattacgggacaccaggttctatctcataactccagaatcacaaggcagggttaagggttaggaatgcccgacctccgtctttttttttttttttttgagatggagcctagctccattgcccaggctggagtgcagtggcacaatctcgaccactgagaaaatttctggctgaggcaggaaaattgcatgaacccgggaggtagaggttgcaatgagccgagatggtgccactgcactccagcctgggtgacagagcgagactccatttaaaataataataataataataataattttaaaaaaattagaaagttgagaagataccaaccatagctggtccccaggaatcgctagtgcaaagctctcgaggttagacagaggttagggtgctagaagaccactcaaggcagggtggtcaaaatttagagagtgggcctggcgtggtggctcatgcctataatcccagcactttgggaggccaaggtgggtagatcacttgaggtcaggagttcaagaccagcctggccaacatggtgaaaccccgtctctactaaaaatacaaaaaattagccaggcatggtggtgtgcacctgtaatcccagctactccggaggctgaggcaggagaatcacgtgaacctgggaggcgaaggttgcagtgagccgagatcacaccattccactccagcctgggtgacagagcaagactccgtaaaaaaaaaaaaaaaaaaaaaaaaaaaagagagagagagagagtgagagggcgagtggaacaggctgagtctgggtggtcagcagggaacagaccatgcagtgttaaatttcatagatgccagagaggagcttcctacctgtggagctggggatggaggatgtggaaatccctggggagaatgtagaagtcactggagctgagaaaaaaagaacatggagaaatgattgggtgtcttcctaaaggaatatgggacaggaactgctcattggaatttggacttctatcttgactcacaccaagaccttgacgggttaggggctgctctgaggctgtggctgggcacgtagggagggagaatgatcagtttctcttctgaggaatgcaccttggggaggaagggtcccaagggcattggaatatcacaggtttgaatactcactgctggtggcaggggtccagtaccgacggttataacctgcagatagggaggaaagagtaaagaaggacaattatgatgggtgagaggtaggggaggggaagatggtagatccagaaatggaaataatgggaaactttcatgatgagcccatctgggctatccctcagccagccagagggaggggaggggcttccaccttcgatgtgtgacttcagctcgcaagggaacctccatctctcagcccagagtggccaaagttgaacaagtcatggacatttcattgagaagaggtggggccaagatcttttgtgaataaaggataatggctatattttatttggtacatattttgtgctttgtcctttgacaataatggtggaaatcatcactattattattcctgaaataaaaataccataatagctgtccctatttattgggaatctagtatatacaaacaataataataaatacattacaagggtggaaagacacatgtatggatgagtgtgctttctacccataaagataatttagtttgattcttactctctcagcttacctcctttcacaaaatttcatgatagtataatttttttccaacttactttctctgtgtgtgtgtgtgtgtgtgtgtgtgtgtgtgtgatgtagaattgacaaaaatgtgatgggtgaagggagtggtgtttttaggtaaaagtacagagaaatgagggatagaaacggttcatatggggccgggcttggtggctcacgcctgtaatcctagcactttgggagaccgagatgggcaaatcacttgaggtcaggagttcaagaccagcctggccaacatggcgaaaccccgtctccactaagaacacaaaaattagcgtggcgtggcggtgggcgcctgtaatcccagctactcaggaggctgaggcaagagaatctcttgaacctgggaggcggaggttgcagtgagcaaagatcgtgccattgcactccagcctgtgcaacagagtgagaccatgtctcaaaaagaaaagaaaagaagagaaaaaagaaagaaagaaggaaaggaaggaaagaaaagaaagaaagaaaggtttcatatggtttggaatattggagaaaatttggcaaaataggtgtggtggtaaaaacaagagacttcaggatgagaggggtggtgttgccattggagcaagaaaggaactggggaaaagagaatttgtcctgagtgtttctctaggtcatggattgcatctcctttgaggctctgtgagagatacaaggaaagacagaacccagggcagccctgttatttatctgggttgttcctgaattatctcatttgattatcagaacaatcccacgtagtatttttattccattccacagaggggacactaaagtctggggaggttacatggcttgtcctgcatccaacaaaacagacatctgtctgtcattcaatagtaccacactgttaagccatgccctaaattagtcataatcctatggacacagaacaggatgtgtacttgatactacaatgaaatactttctgtgtattatctcctatgtcaaggatagaggagtatatatcctctatttcaagtcagatataaaggaaatctccaagtggattcagaagggaagtaacaaattcagcattaggttagatcattagcatagaggccattcatgcctcattcctgtcctgagattggggcttgctctatttggacgatccacagtgatgtcttgtagttaggagcctggagttttcatgagtctccaatcttcggttggagttttcatactgtcctgtgtcataactgagtaattctgggctaattacttcctccctggatgcataaatgctctctgtagaaatgagtatagtaactcacggaggtttgggtaatattaataggagataatgcatataaagttctcatcacaattcctggcacaattcctttttttttttttttcagacggagtcttgctctgtcgcccaggctggagtgcagtggcacaatctcagctcactgcaacctctgcctcccaggttcaagcaattctcctgcctcagcctcccgagtagctaggattacaggcacatgccaccaagcctggctagtttttgtatttttagtagagatggggtttcaccatgttggctgggctggtcttgaactcctgacctcaggtgatctgcctgcctcagcctcccaaaatgctgggaatataggtgtgagccactgtgcctggccctacagtttccttttgatgaaaatgagctgctgttatggttgctattctggtggtggcattgctgcttgggtcattgttgccactgatgttgtgtaaacagttattatttgaggggtatttgctcagggtggggttatttcatgaagtcagtggattccactggcccatggaaactgagaatttgccttgagttgtcatgatggagaaaatgaaggggaggagggtgaactgggcacccagggcccactgcggagactcaaccataggaccctccctcacccatttctttccccgtcgtctgcaaactccagctgggctcttacaggatcaaggtggaggaggaaacatttcataccaggaggtgaaagggaagaggaaattggcctcctttgatgtgctaggcattgaaagatgagccctcagagaactacgagatttgtaccagaacttggaatctgtgtacagcagatgctcaacctcagccctattgacattttggtctggataatgtgttttgataggaggctgctttgtgcattgttggatgttttgcaacatctctggcctctacttactagatgccattagcaaatggccgggcatcatggctcatgcctgtaatcccagcactttgggaggccaaggcaggcggatcacctgaagtcaggagttcaagagcagcctggcgaacatggagaaacctcatctctactaaaaatacaaaattagctgggcatggtggcacatgcctgtaatcccagctactcaggaggctgaggcaggagaatcacttgaacccaggaggcagagtttgcagtgagccaagatggcgccactgcactccagcctgggcaacaagtgtgaaactccatctcaaaaaaaaaaaagttatatgtggatttttgaatgcataggggtcagcaccctgaaccctcatgctgttcaagggcccagctgtagtaataattgccaggaaggaagtgagcatagaggtagaatagagattggctgtgtgcaagatgcgtatacgggggaaatgctactttataaagggtgatccaagctgagatttgaaggacaagaacaccaggtgcaaagactctgagggtggagggatgtttggaccctggaggaaaaaaaaaatgaagctgatatggccagagatgattggacacagcttattcacttactccgttctaaaaatggacactgaagcctggagaggttacatggctcttccggggccacacagtgagcaaaagagaggaccaggacttaaagcaagacctgtaatttaccaaaacctacaccattcattactgcttttaagtcagagtcggtctcaatgaatatatatatatatatatatatatttttttttttgagacagagtcgctctctgttgcccaggctggagtgcagcggtgcgatctccgctcactgcaagctctgcctcccaggttcacgccattctcctgcctcagcctcctgagtagctgggactacaggcatctgccaccatgcccggctaatttttttgtgtatttttagtagagatggggtttcactgtgttagccagggtggtcttgatctcctgacctcatgatccactggcctcagcctcccaaagtgctgggattacaggcgtgagccactgcacccagcctcaatgactattgaaatacaagtttttggcctggtgcagtggctcacacttgtaatcccagcactttgagaggccgaggctggaggatcacttgaggtcaggagttcgagacaagcctggcccacattgcaaaaccgtcgtctctactaaaaacacaaaaaattagccggtgtgatggtgcgtgcctgtagttccagctactcaggaggctgaggcaggaaaatcgcttgaacctgggagaaggaggttgcagtgacccgagatcatgccactgcactccagcttgggcaacagactgagactctgtctcaaaaaaccccccaaaaaacaaaaaaacaaaaattagccaggcatagtggcatgtggcatgagaatcgcttgaacctgggaggcagaggttgcagtgaaccgagattgcaccattgcactccagcctgggcgacagagtgagactctgccaaaagaaggaaagaaagaaaaagacaggaagaaaggaagaaaggaaggaaggaaggaggaaggaaggaaggaaggaaggaaggaaggaaggaaggaaggaaggaaggaaggaaggaagaaaagaaggaaggaaggaaagaaatggaagctttaaatccaggcaaaaagaaagtgtccaaggtggtatagtgaggacatcattaaacaagcattagcttaaattgttggatgagattggacagaggggaacacgctgagacttggtgggcatcaggactcagaccacacagcaattaatcagccactgaatggcagccgacgtttcatgggagctggaagccagattcctacctgtagcgctgggggtggggctcacagatacgagaggccttggagagaacatggaggtcatcggagctgaaagaaaacgcagcgtgaatcgggtttgttgggtcctatcatttagcgaggggagaataggactcttggtgagcactggcatctgtgccttggctcagcctgagacttttgctattctggagtttctgtggggatgagaacctagggaatgggggatactttcctcctggaaggcaggcttagggaggaagaattcccagggcatagggacttcagggccatgtttactcactgctggtggtggagatccaggaccgatggttataacctgcagagagagagggagaggaaggaagaacgaatcagagtgagaagacaggaggaagttaagagaggaaggaggggtagaactcaaaacacaggtgcaccaaccctcctgtgtgctttctctgaggttcattcatgaataacaacagctggggaggctgaggcgggagaatcacatgaacctgggaggcagaggttgcagtgagccaagattgtgccgctgcactccagcctgggtgacagagcgagactccgtctctaaataaataaataaataaatgaataacagctagtctttttttgtttggtttagtttttgtttgtttgttttgttttttgagacaagagtctctctctgttgcccgggctggagtgcagtggttcaagctcatctcactgcagcctccgcctcccaggttcaagtgattctcctgcctcagcctcccaagtagttgtcattacaggcacacgccaccacacctgactaatttttgtatttttggtagagaccaggtttcaccatgttggccaggctagtcttgaactcctgacctcaagtgatccacccactttggcctcccaaagtgctgggactgcaggtgtgaaccagcacgcccagccaacagcttggtcttattagttaactgcctcctacactgatgctcatgatatcctcaccctcattatcattaacaacaatgacaataatcaatcgccagaggccccttcttattgtgggggttcactatgtggctggaatactgccaccttcattaaataaatgatggggacaaaattttctgtttccagccttatttgtgtttccttcatccattacgtataattttgtcattgctgtctgagtttctcctctttcccaacttttcaaagacaggaaagacttttggcagtatagtttctggaattctttcgtgtgaaattgagataataagaggggagggaaagagagagagagagactgactatggggaggggagaggctagggggtccgcaggagatgataaagttgcagaatgagaagaaatgaggaaaaggggattttagtaagtagggtatgttctgaaacatgaattagatcctctttggcactctgtgaatagtgcaaagaaaatttagacttattttacatttgatggtctgactgattttcttgaaacttctgagactggtccaagtggagccctgtggtttacttgggttattaggattttatcttatttgatcttcacaataatcttaggtgacattttaaacattaaaaaaaaatccattccgaaaatagggccaggtgaggtggctcctacctgtaatcccagtactttgggaggcccttgggcggatcacttgagatcaggagtttgagaccagcctggccaacatagtgaaatcccatctctactaaaaatgcaaaaattagctgggcgtggtggcacgcgcctgtagtcccagctattcgggaggctgaggcaggagaatcgcttcagtctgggaggtggaggctgcagtgagccaagaccgtaccactgcactccagcctgggtgccagagggagactctatcaaaaaaaagaaagaaaaaaaaaaaaggacactgaatcctcttgacaggattagtaagatctaacagatatggccgggcacagtgtctcacacttgtaatcccagcactttgggaggccaaggcgtgtggaccacctgaggtcaggagtttgagaccagcctgaccaacatggtaaaaccctgtctgtactaaaaatacaaaaattagccaggcacggtggcgtgcacctgtagtcccaactactcaggaggctgatgcaggagaattgcttgaacccaggagacagaggttcagaggttgtggtgagccgagattgcaccactgcactagggagaatggggaatgggaaattattccttcagtcctgtttggggtgataaaaaaagttttgaaaacagatagtggtgagggttgcacaacaatgtgaatgtattagtactgctgagttgtacaattaaaatgtttagaatggcaatttttatagtatttatattttaccacaataaaaaagttattcttacttgttcttgaggtcacactctcagaggccaaggtggacatcccaggtgtggtcagaggagtaaagaggcttccagccagtgtattgaaggtggttgttgtcttggccacagtgggactggaacctgtggtagctaaattagtggcttcaaccattgtagttctcaagatagtggttggactcactccttctccatgactggttttaggtggtgttggcatctctgatggtatcaaggtcatagtggtgcctgtgacagtcctggaaaattctgggggtccaactgaagttacagatggtgaggtttctgtgttccaggaggtcacagtttggggcttatcagttgttatagaggcactggaaagcccagagacagcaggggaaacagtcagagttagagtactcgtgctggtctctgctgaagagctggtggccagtaagcctgtagtctctagtaaaccaagggaaagagttgaagttggaatcattgtgctggtttctgtccctggatgggtggaaagtggggctgtttttgcagaaacaccaggtgaagcagttggacttagatcaactctgctggttccagttacaagtagggtgaagagagaggatgttgtctgagttgggagagctgtgctagtctctgcaccaggtctaatggtgagtgaggctgtggtctctgatacttgaggaaacacagttgaagcaggaaatgttttacttgtctctgttctgggatgggtgctcaataaggctgtggtctctggcataccaggagaatgagtcaaagttggaacagttgtactggttgctgccccagaactagtgatctgtgaagtcaccatctctggtgcaccaggtgagattgttgtcagtacagctgaactggcttctgtcctaggactggtggccattacaggtgtggcatctggactactatgggaaaaactggaggttgttctggaaacaggtgtgctggtctgtggaggatgagtgacccaggaagccattgtatctggctcactagagggaacagtccgaattggaacagtgaagccagtctgtgtcccaggatgggtagctgatgaggctgtggtctctggttcaccaggagaaggagtcaaagttggaatagctgtactagtgtctgttgcagaactagtgacctgtgaggtcactacccctggtatactgggtgggatggttgtagttggaacacctgacctcgtgtctactccaggactggtgaccattgagggtgcagtgtctgatcccctatgggaaaagttgggaattgtcccagaaaccgttgtgctggtttctgcaggatgagtgagccacgtggctgtagtctctggttcatatggggtctcactcaatgttgggaaggttgtactggtgtctgtcccagaactagggaccagtgaggtcaccagatctgacatatcaggtgagatagttgtcgttgaaacagctgaactggcttctggcccaggactggtgatggctactgggagtgtggtgtctgacttactatgggaaaacttgggagttgtcctgggaaccattgtgttggtctctgcaggatgaatgagctgtatggctgttgtctctggttcatatggggtctccgtcagtgttgggaaagttgtagtgctgtctgtcccagaactgatgaccagtgaggtcagcatctttgatgcaccaggggagacagggagagttggaatggctgaacttgtgtgtgtctcagaataggtgataaatgaggttgtggtctctggctcaccagaagaaagagtcagagttggaatagttatactggtgtctgtcccagaactagtgacctgtgaggttaccatatctggtacatcaggtgagacagttattgttggaaaatctgaagtggcttctgccccaggactggtggctattgatggtgtggtgtctggttcactatgagaataattaggggttgtcctgggaactgttgtgctggtgactgcaggatgagtaacccatgaggctgttgcctctgattcatgtggggactcaggcactgttggaaaagttgcactgatgtctctcccagagctagtgaccagtgatgtcagcacacctggtataccaggtgaaatagttgttgaaatggctgagctggattctgcctcaggactggtgactgtagaaggcatagtgtctaattcactgtgggaaaaccttgaggttgtcctgggaagagttgagctactctctgcaggatgggtgaccaatgagatatttgtaaacggctcaccagtggagacagtcaaagttggaacaacagaacttgcttctgtcccaggatgagcgacccatgagtctatggtctctggttgacttgaggcaacagttagatttgaaaacgcactggtctctgacccagaactagtgaccagtgaagtcaccagcccttgtacagtaggggagacagctaaagttggaatggctgaaatcatctttgcctcagaatgggtgaccaatgaagttgtggtctctggttcatcagaagaaatagtcagagttggaatagttgtactggttactgctctagaactagtgaccagagaggtcaccattcctggtacctcaggtgaaacagttagaacagctgagctggcttctaccccatgactggtggccattgaaggtgtggtctctggctcactagaagaaagagttagaattggaatagttgtactggtcactgccctggaactagtgaccagaggggtcaccactcctgataccccaggtgaaacagttggagttggaacagctgagctggcttctgccccatgactggtggccattgaaggtgtggtttctagttcaccaggagaaagaatcagagttggaatacttgtactgtttactccactagaactagtgaccagagaggtcaccactcctggtacctcaggtgaaacagttggaacagttgagctggcttctgccccatgactggtggccattgaaggtgtggtctctggttcaccaggagaaagagtcagagttggaagagttgtactggttactgccctagaactagcaaccagagaggtcaccattcctggtacctcaggtaaaacagttggaacagctgagccagcttctgtcccatgactggtggccattgaaggtgtggtctctggttcaccaagagaaaaagtcagaattggaatagttgtactagtcactgccctagaactagtgaccagagaggtcaccactcctggtaccccaggtgaaacagttggagttggaatagcagaactggcttcttccccatgactggtggccattgaaggtgtggtctctggttcaccaggagaaagagtcagaattggaatagttgtactgatcactgccctagaactggtgaccaaaggggtcactactcctggtacctcagttgaaacagttggagttggaacagctgaactggattctgccccatgactggtggtcattgaaggtgtggtgtctgatttactatggaaaaaaatggaagttgtccagggaactgttgggctggtctgtgcaggatgcgtgaccaatgaaactgttgtagctggttcaccaggggagtttgtcagagctcgattagttgtacttgtctttgccgccaaactggtgaccattgaggtcaccaaccgtgatacagcaggcgagatagttgaagttggaatggccgaacttgtctgtgcttcaggatgggtgactaatgaggctatcgtctttggttcaccaggagaaagagtcaaagttggaatagtcatatttctgtctgtcccagaactagtgacctgtgaggtcaccagatcttctgcaccaggtgagacagtcataattggaatagctgaactggtttctgccccaggactggtggctattgaaggtgtggcatctgattcatgatgagaaaaattggggattgttctgggaatagttgagctggtctctgcaggatgagtgagccatgtggttcttgtctctgtttcatgtggggacttagtcagtgttgggaatgttgtactagtatctgtccccgaaatagtgaccagtggggtcagtgcatctagttcactaggtgagatatttgttggaatggctgagctgacgtctgccccatgactggtggctgtggaagatacagtgtctaattcactgtggaaaaaattgggggttgtcttggaaacagttgggatggtctctgcaggatggataacccatgaagctgttgtatctggctcactagaagaaacatctagagtttgaataaccggacttctctctgccccagaacgagagaccagtgaggctgtggtctctgattctctattgaaaacagatggggttgtcctgggaagagctgtgctggtttctgctcccaggctggtagccaatgaggatgtcgtttctggaacatcagggaaaacatatggggttgtgatcatcatttctgtggggattgtgctggccatttgcattgatgcattgaggggagtcagtgttcccaaagtgggagtatagacactggtggtcaaggtggctctggaagtggtcttcagagctgtggtggtggtcttcagagctgtggtggtggtctccattctttttgtccctcctgtgtgtagtcctgtaaattggggaatgggcacacaatttgaacaaaatgattacacttactggacttgcaatagcttatttattctccacaggaggaaagggagagaaatgtctctcggttactaggatgtgtctgggatgcttctggaatgggaaaagagattgtgattggtattcccctatcttaccttggtctgtaacttggttgcatcttcacctataactcctctgtgaattcttgaccgctactctattccctcttcccatgtgtttcctgcactgtcagcctctgagccttgttcaagctcttctctctgcctgaagtgcccacttctcatcagattccttaagttctgccattattgaaatccaagcccacatccacctttacaaattcactccagaactcatctttgcttctcaatatttccttatcacactgtctgaatctgcgttgtaccatccttcacagtctcatttgtaacagctattcacgtttgactgtttggcatacggtaagtgctcaactaatatttgttgaatgattgaatgaatgaatatgtggatggatgtatacttaagtggatctcctctgacttgagagagattaagtattgtgtatcatgtgtttgagagcttgggctctggaataagatagccctgcctgggattctggctctttctctaaagagatgggtggctctttaagttaaaaaatattgctggacctccattttcccgtctataaagtggggataagtacaatggccatctcaaagtgttggtaaaaaggcgccaagcacagtgcctcctgggtcacgataagacattactactattaccacgactatgacctgctattgctactgttattactatcacttctccacctaccattactgctgttattgctactgttactactacctattgcaatggttattactatgattactactactagtactgctactactgttactaccactattactattgctactgttactgctaccactgctactactactgttactactaccaccactctacctaccattactgcagttattactactgttaccacaactattactacctatcactatggttattactatggttactgctacttactattactactgctgttgctattactattattactatcactaccacttaatattactactctacctacagtagagtaacagcagtaatggtagtgctctgtcattactgctgttattactactgttactactaatattactgcctattgctatggttattactatgttattactatggttactactattaatactattgttgctagcactattacttatgatttctactgtcactactaccactgctactacctactgctactactgttactaccaacacaactctacataccattactgccattatcactactattactactagtattactgcttattgctatggttattgctacagttactactacttactagtgctattgctgctattgttactaccactactacttaccattactactgtcactactaataattctactacaaaataaacatttgctaaatagaattctccaccaaccacactagacactaccagagctgaccaaggtgactggaatacctttgaacaagattccagtagcattgatgagacagcagctgctgaccaggctttagaaaatggttcctagggaagaggaagaactaactggaggcttctctataaagcccacaaagcctactggagcttggtagagaaagggggtaaaatgaaagggattttgactctgattatggagcagtgtccctgtgttgctggatatcctctaaaaacaatatgtctgagaatgcactctcaagtgcttcatgtgtatctaacaataatggtgaccatgatggtgattatgttgatgggaaggaggaggaggagcaattgcaaagcacttgacatgcactgtctttttaaacctcacaagaacattaaatggcacattctggccaggcgcggtggctcatgcctgtaatcccagcattttgggaggacgaggtgggcggatcacctgaggtcaggagttctagaccagcctggtcaacatggtcaaaccccatctctactaaaaatacaaaaattagccaggcttagtggcgtgcatctgtaatcccagctactcgggaggctgaggcaggagaatgactcaaactcaggggatggaggttgcagggagccgagattgcacctctgcactccagcttgggtgacagagcaagactccacctcaaataaataaataaataaagtgagataaaataaaataaaatgcacattgtataattcttgtcattttacaggagagaaagagaaatccagagaccacaatttaccaaggtcacacacagctattgacagggcaaaaacttgaacatcatcgtatctaaatcctaaacccatattattaaccattgcattatattaattcactaaaggaacttctggatcttgtggggaccagaatggaaagagaatgaagtgaggtgaaaacgcccatctagtaagatggatcttaggatgcattctccagttcagtggttctcaaccaggggcagttttgcttccaggggacacttaacaatgtctggagatatttttggttgtcacaactgtgtgtgggcagaaggtatggcatctagaacagaggccagagaggctggtaaacatcctacaacgcacagcacagcccccatcgcagagaagtatctgccccaaatgacaatagtgtcaaagttgagaaacccagatttttatttatttatgtatttcatattactgccttttaaagtgaaaattttgtttcagactttattcaaaacagaaggaggaattactaaatattgtgacaaagaaaacatataacagtgatgtcataaaccatcttacatttatatcgtgtttttattccccccattgtacttacatattgtgatttagctctccagtgatgacaaacaaaaataacccaggagctcacccatcttctttatttaagtgacagttaaaaaaaatgtacagttccaaatttttcatcatgggagatataatcctagatatttttgtgaagtttctcttacaagagagttatgtctgtttttcaaccagggcatacataaaggctgttaatttatacttccttttcctacatttgctagaactattgggatgcattttcagacatactctgtctctctctctctctctctctctctctctctctatatatatatatatatatatatatatatatatacatacatatatatatatacatacatatatatatacatatatatatagtatattttatttaaataaaatatatatatatatatataatttatttatttatttttgagctggagtcttgctctgccacccaggctggagtgcattggcacaatctcagctcactgcagcctctacctcctgggttcaagtgactctcttgcctcagcctcctgagtagctgtgattacaggtgtgtgccaccatgcccggctaatttttatattttcagtagagatggagtttcaccattttggtcagactggtctcgaatttttgacctcaggtgatccacccacctcagcctcccaaagtattgggattacaggcatgagccactgcgcccagctcatagtaagtttttaatgagcatttttaaaatttggttaatatggacaaatttgtgaatatttgatgttggacaaaactcactcagcatgccatgaggagaaagagaagtggtaacatctgcctggtaaccattagataaagactcagttcagacagggaaacctatgacaaccacacacaattctctctctaaagaatacaaacattttgtctctctggaggaggaaatatggtcacgagtggcattactgggaggtaagcaaagttaaacctacctttaggactggcaggcgaagtggatgtctgagggcctttgactggtcttatggtacctctgtgtgctgcttcattgggtatttttgtgatgtgttccataatgccatcagttcctgaagatgaaggtggggagaaaaactggggtaactcatctcattcagaagaagagcactgtctaaatggatccacttcattggccacaaacactcctcaagtccatcagtatgaactggagctgggactatgtgccataagtggccacacctgtccatagatccatccacctacctatagatttgtccatccttcctttcattcatccctagatctgatcatctattcttccattttttcttccttttattctttccttctatcacccattcttccttttgtctttcctcccttctttcctttctcttgctttttaaaattttaatttaaaagtttgtatttcaatagctttgagggtacaagtggttttttcttatatggatgaatcatatgtggtgaagtgtgagattttttgtgcaccctcctttcttctttccatccatcttttcttcaatctttacttcatttcatccttctacctttctttccttcaatctatatccccttcaatcctgtcttccatcatctttctttcttttcatccttccttctgtgcatctatccttcctccgcttcatctttgcttccttccattcactcttctctccattcttccttttatccatccaactacacttctcccttctcgccatgccattcatcacttgcttactgaacacccgtgactcaactactgagtcacatagtaacatatgggtcaatagccaccaatgtgtctaaatttagtgtgaattacaaaataatgtgaagaaggagagggagcaaatcattctcctggagatattgtccagtgaggcagaaactcgagtcgttggagggcctctttggatttgtgtccagaacaaaagttggtgccaagctcaaccctttcagaggaatggaatccccaagaagttccttcctttatctactgacctcttggaagtagtgtttcctccttctaggctctgggtgtcttctaccttcttaggtactttgttccctctattttcattaattcactttttcctttcacttatcccttttgtctcttgctcaactcaaagggagaaaccctcccttacgtctacgtagtattttagctgttcttctaatgccctatacctcactgatgctcccttcattagaatccctgagaacccccatgttgccaaagcacttctcacctcatttcaacttggcaattctgtggtatttaacagaacttaccatttctccttcctaaaaccctcccctcctgtggcttctgtgatgccagaacttcttgccttttctgttacctctctgaccactcctgtttagcccagcagttaggagcatgagttcctagtgacacacaatttgagttcttatcctagttctattgctttctagctatatggacttaagaaagttacttaatctccctgtgcctaaatgtcttcatctccaaaataggcttctaataatctctacttcaattagtgttacaattgaggatcaaatagcttaataaaactgcacttgaaacagagtaagtactgttataaatattttctgttgtcattcttattgtcatcatcatcattactagtagtaatattagagcacctatcacgatactgtaatgattcaattatttgcttatttttgtttctccaattccttaacccagtgcctaggagtgaaattagataaacacatgtttgctaagagaatttctggtacaggaataaactagttaactctttttttgcttcttaggaaggggtcatttcctatgagcccccaataatgggattgtaggggctgtgggtccttacttgtcaaccgtgttgagagtgaaggaacttgataagcacttgtcactgttcccagctcaacgctctctgtcattctggtatccaaaatgggtgatgaagatgtcctgcctggttggcttgaagtgtccaaagtactgaccataaccaagcgtccttcagtagtgctgctctctgtcccaagactggtgtccactctatatggggtagctgaagaggaagttatctcatggagggctgggatggttgaagaatcagtggtagtgaaggttgaagaggagaatggcacaggagtggatgaaggcaggctctctgcaatggtggacagagtagcatccccagggcctgactctgtcctagagaatggactacctgaacctgagatggctcgtggaactccagtggtggcaaatgaagtcatggcctctgatagagaaggcatcactgtgccagtggaaatagtctcagctgaaggcagcaaatctgtactcagatgatgagtactttctgttacagacatagtaaacctggattctgggaaggaggttatcccagtggactccgtaatagatggagaagcattaaagggggtgattatgtccactggaatttcagtatactgtgaggctggaggccagtctggggatgatgtttttgcagaagaggtgaaatcagtcttggaactctgtaaaaggtgagtggacccaggagaagaaggtgtatttgttggtgtgactgagctggtgtccagggacatgtttgtcttcctaaatccagaagtcaaatgagaaaatggctcagcctcaaatcctgtggtctcaaaattagcaggcattgatgtggaaatagaggtttcagccatggaagagggagtacccactgggtatgtagccttggatggctccgagtggattgaaacagaggaatatagttcatgtccagaactggtggttcccacattggtcactgccatgcttgaagaaggatgaattttctctgtatctgtggtgacttcagaggcagccagtatttcaactgaggtgccactcagatttggagataaactggttccaggttctgtgcttgtgtctgtagtcttcaccatgcctggggtgaggagtgaagtcacagaaaaagaggaggaagggatactctgcggtaatgtggaagaaacagaaggtgaggtcgtgacaggtaaggacaacagagaagatgaagagctagttttttccacaaagagagagctcttccatgatggattttcaggactcctactcataagagttgtcatctctgagtgtaaaaatctaggaggaacagttgagtgggtccttgccaagggggctgttgttgtggccaaggtaagagtactctgtgctgtagccccaggagaacttttttgggtggtgatggtcatttgtgttgattctgacatcatggatgaggaagagagcctggtgatcacttcagtgatgatgtctggagacatcgtggactgatcagagtcagggatgtgtattctattagaggacatgatttctgtcatggagacttcagtagtagcactagtgggcactccataaaggactgcacttgtttctgtgattgaggtggtctcttcagaggtgctagtctccctgaatccaggagtcaatgagaatgttggctctgtcggaatcctcctagtctcagagaaggcaggatttgatgtgaaaacagtggtatcgtccacagcggaggtgatacccattgaaggtatggttatggttgtttctgagtcagctaggacagaggaatgagattcatgaacagaactggaggtcctcactttggccaccgctgtgtttgaggaaggatgaattttctctgtatctgtcatgatttcagaggtggccggtatttcaactgaggtgctgctcaaatttggagatgaactggttttaggctctgagcttgtatccaacacttctgtagtcttcaccaggcctgggaggataagtgaagtcacaggaagaggagaggaggggctactgtctagtaatgtggaggacacaggagaaagtgaggtcgtgagaggtaatgatgtcagagaagaggaagatctagttgtttccacaaagcgagggctcgtccatgacagactttcaggacccctgctcataagattggtcatctctgagtgtgaaagtccttgagacatagttgagtgggtccctgacaaaaaggtcattgaggtgcccaagggaagggtaacctgggatgtagccagagaataacctgtttgggtggtgatggttatttctgcagattctgtcatgatgggagaggtagacagcctggtgacaacttcatcggagatgtctagtgacattgtggactgagcagggccaggaatggatgttctgctagagggcataacttctgtcctggagacctcaggagtggcaccagagggcatcttgtaaaggacagtgcttgtctctgtggatgaggtgatgtcctgggaggttctggtctccctcagtccaggggtcagagatgacattgactctatctcaatccttgtaatgccagaggagccaggcattgttgtggaaaccatgttgtctcttatagaggaagaggtgaccactggagatatcacttttgttggctctgagaagcctggggaagaggaatagagttcctctgtagcactggtggtttccacatgggacgctgctgtattttcaaaaacgtgaattgcctctgtctccgtggtggctttagaagcggccagactctcatctgaggtgatattcatattgggagctgaagtggtctcaggttccaaacttgcatccaacatgtctgtggccttcatcatgatagaggtgaaaagagaagtgacagggacaggagaggagtggctactcccagatggtgtggaataaagtggcgaaggtgaggttactgaagatgaagataccagggaagatggagggctgtttttttccacagacagcgggcttggccatgacacatcctcaggacctctgctcataggagttgtcaccactgactgtggaaatctctgagttgtagctgagtgagttcctggccaggaggctgtgcttgatgagtccaaggtaaaggtaccctgcgaggtagccccagaaggacctgttttgggggtgatggccatgtctgttgattctttccttgtgaggggggtagaaattctagtgatggtttccatggaggtgtctgatgacattgtggattgagcagggcctgggatggatgttctgctagaagagatggcttctgtcctggagacctcagtagtagcaccagtgggcacactagaaaggacagtgcttttttctgtggcagagctggtctcttcagagatgctggtctccatcaacccaggagtcagtgagagctttgactttgtttgaatcctactggtgtcagagaaggcaggggttgatgtgagaacatttgtatctcctgtggggtaggtgatacccattgaagatgtggcctttgttgtcactgagtcagctaggacagaggaaggagattcatgtgtataacctgaggttaccacattggtcatctccagtttctctgtatctgtagtgacttcagtgatggccagtatttcagctgaggtgctgctcaaatttgggggtgaactggtttcaggttctgagcttgtgcccaacagctctgtggtcttcaccagccctgaggtgagaagtgatgtcacaggaagcgaagaagagtggatgctgtctggtaatgtggaagaaacgggagaagatgaggtcatgacaggtgaagacagtgagaaagaggcagagctggcttcttccacagagggatggcttagccatggcacatctccaggagttctactcataagagcggtcatctgtgagtgtgaaaatccttgagatgcagttgagtgggtccctgacataaaagttgttgaagtgtccaaggtaagggtaccccttgatgtagccccaggagaacctgtttgggtggtaatggtcatttctgtagattctgtcttgatgggggaggtagagagcctggtgatcacttcagtggatatgtcttgtgacattgtggactgatcagggctaggtcctctgctagaggacatgacttgtgtcatggagtcctcaatcgtggcactagtgagtgccttgtaaggaacagtgcttggctttgtggctgagtggatctcctgggaggtgctggtctcccttggtgtgggggtcagggtggatgttgactccatctcaattcttgttatctcagaggaagcaggtatggttgtagaaacaatgtcttttatggtggaagaggtgaccactggagatgtcactttggatggctctgggaggcctggataagaggaatagaattcttgtctagcgctgatggtgcccatctgagtcacagctgtgttttctgaaagctgaattgcctctgtctccatggtggctttagaagtggccagactctcatctgaggtgatattcatactgggaggtgaagtggtcacaggttccaagcttgtgtccaacatgtctgtggtcttcatcatgacaggggtgaaaagagaagtcacccggagaggagatgagtggctactctcagatggtgtggaataaagtggcgaaggtgaggttactgcagataaagacaccagggaagatggagggctagttttttccactgatgggcggcttggccatgacacatcctcaggacctctgctcataggagtggtcatccctgagtgtggagatctgtgagttgcagctgagtgagttcctggccaggaggctctgcttgatgtgtccaaggtaaaggtaccttgtgaggatgccccagaatgacctgttttgggggtgatggtcatttctgctgatcctgtcgtggtgaggggagtagaaattctagtgatggtttccgtggagatttctggtgatattgtggattgagcaggacctggggtggatgttctgcctaaggagagggcttctgttctggagaccttagtagtagcaccagtgggcattccagaaagagaagcacttctctctgttgctgagctggtctcttgagaggtactgatctcccttaatccagaagtcagggaggaagttggctgtgtcatcatagtttctgggaaggcaggagttgatgtggaaacacttgtattccccagagtggaggtggtagccattggagatgtgggttttgttgtcactaagtcagccaaaacagaggaaggggatagatgtttataaatcacagtccctacattgactacaggtgtgtttgaggagggatgaattttctctctatctttggtgacttcagacgtggctaatatttcagctgaggtgctgctcaaatttggaggtgaactggtttcaggttctgagcttgtgcgcaacatgtctgtggtcttcactgggccaagggtgagaagtgcagtcacaggatgaggagaggaggagatgctctctggtaatgtggagaaaaaagaagttgaggtcatggcaggtgaagacagtgaggaagagacagagctggcttcttccacagagggaaggctcggccatggcacatctccaggagttctactcataagagtggtcatctctgagtgtgaaaatcctggagatgcagttgagtgggtccctgaccaaaaggttgttgttgaggtgtccaaggtgagggtaccctctgatgtagccccaggagaacctgtctcaatagtgatggcactttctgctgattctgtcataatgggggaagtagaaagcctggtgatcgcttcagtagagatgtctggtgatatggtgaactgatcaggccctgacatggatgttcccctagaggatatcacttctgtcctggagacctcagtggtagcaccactgggcacttcagaaaggacagtgcttccctctgtggctgagctgatcctctcagagctgctggtctccctcaatccagaagtcagggaggatgttggttctatctgaattctgctggtctcaaagaagtcagaagtggatatggaaacactcgtttcccccatggtgtaggtggtacccattggagatgtggctttgggtgtctctgagtcagataggacagaagattgtgattcatgtccagaaatggaggtcctcacgttggtcactgctgtgtgtgtggaaggctgcatgtcttctgtatctacagtgtcttccaaagtggtcagtctctcatgggaggtgctgctcaaatttgaagtggaactggttccaggttctctgcttatgcccatcctgtctgtggttatcaccaggccagggttgagaagagaagtcacaggaagagaagcggaagggaaatcctctactaatgtagaggaaacaggagaaggtgaggtcgtggcaggcagagacagcagggaagaggcagagctggtttcttccacagaggattgactaggccataacatatcaccagggcttctgctcacaagagtggtcatctctgagtgtgaaaatctctgagtcacagtcgagtgggtttctacccagttgggtgttgttgatatgtccacagtatgagtactctctggtgtagacccaggaggatctgtttgtgtcttgatcatcatttctgctgattctgtcattatgctggaggtagggagtctggtgatggtttctgtggaagtctctggtgacactgtgagctgagcaaagcctgagatggatgttctgctagaggaggtgacttctgtcctggagacttcagcagtggcaccagtgggcactccagaaaggacagtgctcatctctgtggctaagctggtcccctcagagctgctggtctttctcagtccaagggtcagggaggatgttggttctgtctgaattctgctagtctcaaaaaagccaggagttgatgtggagacactcgtatcctccatggtggaggtaataaccattggagatgtgactttggatgtctgtgagtcagctaggacaaaggaagtggattcatgtccagaactggaggtccccacatcggtcactgttctgtttgaagaaggatgagttttctctgtatctgtggtgacttcagaggtggccagtatttcaactgaggtgctgctcaaatttgcaggtgagttggttacaggttctgagcttttgtgcaacatatctgtagtttttgccaagccagacgtgaggagtgaagtcacaggaagaggagaggaagagatgctctctggtaatgtggaggaaacaggagaaggtgaagttgtggctggtgaagacatcagagaaaaggaaggtctagttttttccagaaggggagggctcatccatgatacatcctcaggacccctcctcataagagtgctcatctgtgagtgtgaaaatccttgagatatagttgagtgtgtcattgtcaaagaggttgtgcttgacgtgtccaaagtactggtgccttgtgttgtggcccctaaaggacttgtatgggtgttcatggttatttctgctgattctgtcatgacaggggatgtagagaaccagctgacggttcttgtggagatgtctggtgatattgtggattgagcgggacctgggatggaggtgacgtcttccttggagatctcagtagtagcaccagtgggcactttagagaggacagtgctcatcttggtgcctgagctggtcccttcagagccgctggactccctcaatccaggggtcagggaggaagctagctctgtctgaatcctcctagtctcaaggaaggcaggagttgatgtgagaacacttgtatcccccatggtggaggtggtacacattggagatgagtcagctaggacagaggactgtgatttatatccagagctggtggttgccacattggtccctcctgtgtttgtggaaggatgcacggcttctgtatgtgcagtgtctttgtaagtggtcagtctctcatgggaggtggtgctcaaacttgaagatgaactggttccaggttctgtgcttgtacccaagatatctgtggttgtcgccgggccagaggtgagaagtgaagtcacaggaaggggagagggggggatatgtgctaggaatgtggtggaaacaggatgaggtgaggtcacggcaggtaaagacagcggggaggatggagggctggtttctttcacaaagggagggctaggccatgacacacctccaggacctctgcccatggaagtggtcatctctgggtgtggaaatccctgaattactatagagtgggtttccacccaagagggtgtggttgctgtgttcaaattaagggtactttctagtgtagactccgaaggacctgtttgggttgtgatggtcatttttgcagattctgtcaggacagaggaggcagaaatcctggggatggttcctatggagatgtcttgtgacattgtggactgctcagggcctgacatggatgttctgctaaaggagatggcttctgtcctggagacctcagtagtagcaccagtggacactttagaaagaacagtgtttgcttctgtggctaagctggtctcttcagaggtgctggtctccctcaatctggtggtcagtgaggaagctggctctgactgaattttcctagtgttagataaggcaggagttaatgtagaaacacttgtatcccccataatggagatggtacccattgccgatgtggctttggttgtctctgagtcaggtaggacagaggaaggggattcatgtccagaactggaagttccaactttggttactgccgtgtttgagaaaggatgaattttctccgtatctgtggtgacttcagaggtggccagtatttcaactgaggtgctgctcaaacttggaggtgaactggtttcaggttctgcacttgcgtccaacacctcagtagtcttcacttggcctggtgtgagaagtgaagtcacagaagcagaagaggagtggctacttgctggtaatgtggaagaaacaggagaaggtgagatcatggcagataaagacagctgggaagatggagggcttgtttcttccacagggagagagctgggccgtggcacatccccagcacctctactcacaagagtggttatctctgagtgtggcaatctctgagtcatagtcgaatgggttattaccaaggagggagtggttgatgtgtctaatgtaaaggtactctctgatgtagacccaggaggacttgtttgggtcttgatggtcatttctgatgattctgccaggatgggggaagtagggaacttaatgatttttcttgtggtggatatttctggcaacattgtggactcagcagaaccagagatggatgttctgctagaggaggtgacttctgtcctggagatctcagtagtagcaccaatggacacttcagaaaggacagcacttgtctctatggctgagcttgtctccacagaactgcctgtctccctcaatttagggctcagggaggaaattgactctttctgaattctgctagtctccaagaagtgaggggttgatatggcaacagttgtatcctcctgggtggaggtaataaacattggtgatgtggctttggatgtctctgagtcagctaaggcagaggaaggggattcatgtccagagctgggaatctccacattggacgctgctgtgtttgtggaaggatgcacagcttctgtatttgtggtgtccttgccagtggtcagtctctcatctgaagtgtggctcagctttggaggtgaactggttacaagttctgggcttgtgtgtaacatgtctgtggtcgttaccgggctagaggtgagaagtgaagtcacaggaagaggagaggaggagatagtcactggtaatgtggaggaaatgggaggaggtgaggttgtggcaggtaaagacagcagggaagggagagagctgggattttccagagagggagagctttgccatgacatatctccaggacctctgctcatgagagtggtcatctctgagtgtggaaatctctgagtcaaagttgaatgagtctttgcctgggactttgtggtggatgtgtccaaggtaagggtatcctgtgaggtagacccagaaggacctgtttgagtggggatggtcatttctgctgattctgtcatggtgggcgaggcaaagagccttgtcattgttcttgtggatatttctggcaaaactgtggactgagaagggccagggatggatgttctaccagaggaggtgacttctgtcctggagacctcagcagtagtaccagtggggacttctgaaagaacaatacttgtgtcagtggaaaagctggcattttgggaaatgctggtctctctcagtccaggagtcaaggaatatgttgactctctcttaatttttgtagtctcagaggaaacagacattgatgtggaaacagttgtatgccccatggtggaggtggtatccattggagctgtggccttggttttttctgagtcagctaggacagaggattgtgacccatgtccagaactggtggtttccacattagtcgctgctgtgcttgtggaaggatgcatggcttctatagctgtggtgtcttcatctgttgtcagtatctcatgtgaggtactgctcaaatttggaggtgaactggttgtaggttctgggcttgtgcccaatgtgtctgtggtcatcactaggctaggggtgagcagtgaggtcataggagaaggagtggtgtgaatggtctttggtaatgttgaggaaacaggaggtgaagtcatggctggtgaaggcatcagggaagaggagaagctggttttctctatagaaggagggattgtccatgatagaatctcagggtccttgttcatgacagtggtcatttctgagtgtggaaattcctgagtcgccatcgagtgtgttcctgccctggaggatgtagttggtgtgtccaaggtaaatgtgccctgtgatgtagagccaagaggaggacctgttcgagtgatgatggtcatatttgaagattctgtaatgccaagggagataggcaggctggggatcacttcagtggagatgtctggtgactctgtggaatgatcagggcctggaatggatgttcttctagaagaggcaacttctgtcctagaggtctcagtagcaccagtggtcaacttgtgaaggacagcacttttctctgtggatacgatggggtcctgggaggtgctggttcccttcagcccatgagccagggagaatgttgactccatctcaatccttgtaatctcagaggagccaggcatggatgtggaaacaatggtgtcccttatgttgaaagaggtaaccattggagaggtgactttgggtggttctgagtaggctgggacagacgaataagattccttttcagaagtggtggtccccacattggttactgctatgtttgtggaaggatacattttctctgtatctttaatgtcttctgaagtagtcggtatcttatgtgaggtgctgcccaagtttggaggtaaactggccacagatgccagcatatctgtggtcttcactaggccagaggtggggagtgaagtcagatgaacaggagaagacggcctactttctggtaatgtagtaggtacaggggacggtgaggttattgctggtaaagacagaagggaagaggaagagctggttttttccacagagggtgggcttgtccctgatatgtactcaggaactctactcgtaagagtggacaaatctaattgtgaaaatccatgagtcatagctgagtgggtccctgcctgtgaggttgtgattgatgtgtcccaggtaagggtaccctgtgatgtcgccctatgaggacctgtttgggtggcaatggtcctttcttcggattttgtcaggccagcaaaagtagaaagcatggtgacagatcttgtggaggtgtccggtgacattgtgggcttttcagtgccttggatggatgttctgctagaggaggtgagttctgttctggagacctcagtagtagcagcagtgaatgctttgtcaaagaccgtgcttgtgtctgaggatgagccaattttctgggaggtgctagtctccctcagtctaaatatcagggagaaagttgtctcagactcaatctttttcatcgcagaggatctaggcattgatgtggaaactattgagtcccccgaggtggaagtgataactactgcggatgtggctttatatgggtctgagtcaggtgagacagtaaaatagaattcatttggtgaactggtggtccccacattggccactgctgtgtttatagaaggatgcattgtgtgtgtatctgtggtggcttctgaagtggccaaggtgttccttaaattttgaggtgaacgagtcacaggttctaagtttgtgtccatgtctgtgatcttcgccagtgtaggggtgggtactgaggtcacagaaacaagagaggaggtactgtgctcttgcaatgtggaagttacaggagaaggtgaggttgtcacaaggagaggtgcctgagaagagagagagttggcttcttctgcagagaaagggcttgtcttcaacacatcattgagatcattgttcatgacactggttgtttctgaatctacaaaatcctgagttctggctgatggagttcctgctgaggtggctatggttgatgtgtccagggtcagttggccaagagatgtcaccccagaaggacctgtttgtgtggcgatggtcttgtgtgtagatattgtcaagggaggagagttagaatgactgctgctggcttcaggtgaaatgtctggggactttgttgactgagcagaagctggcatgaatgtaggatcatagtaggtgacttctgccctggagacctcagtagcagcatccagggacacactggagaaaacagtgtttgactctgtagttgagttcatcaccagggcggtgctgtcctctttcagttcaggagtcagaggggatgttgagtctctgtcaacatttttagtctcaggagaaccaggtgttgatgtggaaacaatagcgtcctccatcatagatccagtaacctttggaggtgtgtgtccggatggctgggagtggattgagacagaggaatgtagtttatgcatagaattggtggtccccatattggtttctgctgtgttctctgaaaagtgaattgtctctgtatttgtggaggcttcagaagtgagtatctcacctgagaagctacttgcacttggtaaggagctggtcacaagttctgagtgtgtgtccaacatgtctatggtcttcctcctgccagaggtgagaagggaagtcacagggagagcagaagtggggctacttcctgatactgcggaataaagagatgaatgtgaggttattgcaggtaaaggcactggggaagaaggagaactggtttcttccacagagggagggctttgccatgacacgcccttagtacttctgctcatagtagtggtctcctctgagtgtggaaatctctgagtcacaggtgagtgagtcccttcccaggaagctgtgcttgatgtgtccagggtaagggtagcctgtgagatagtccctataggacctgtttggttggtgatggccatttctgtggatcctgttacaaaaggaaaagtggagagcctggtgatggtttctgtggagatgtagggtgacattttggaatgatcaggccctgagatggttgttctgctggaagtgataacttctgtcctggagacctcagtagtagtagtagtgggcacttctgaaaggacagtgctggtctctgtcacagtgttgatctcctcagacgtcctggtgtcccttaatccaggaatcaaagaggatgttgattcagtctgaattctagtctcaaagaaggcaggagttgatgtagaaacacttgtatcccccatggcgaaggtgatacccattggagatgtggctttggatgtgtgtgaatcagctgggacagaagattgtgattcatgtccagaaatggaggtccccacgttggccactgcagtgtttgtatgcatggaagcatgcatggcttctgtgtgcgcagtgtctttgtaagtggtcagtctctcctgtgtggggctgcttaaatttggaggtgaactcgttacgggctctgggcttgttgtgcccaatacatttgtggttgtcaccagaacagaagtaagaagtgcagtcacagggagaggagaggaggggatgctctctggtgatgtggaggaaacaggagaaggggatgtcatggaaggtgacatcagggaaaacccagagctggtttcttccacagggggagttgtcatccatgacacatctccaggggttctgctccgaagagtggttatctctgagtgtgggaatccctgagacacggttgaatgagtccctccctggaaaagtgtggttgatgtgtcccagggaaggataccctgtgatgtagccccaggagtagttgtttgagtggtgacggtcatttctgcagattttgtcatgatgggggaggtgaagagcctggtgatcattcctgtggagatgtcgggtgctattgtgggccgatcaaggtctgagatggatgttctgctagaggagatttctgttctggaggcctgagtaatagcacctgtgggcacataagaaaaggcagtatttgtctctgttgttgagctggtcttctcagacgtgctgctctccctcagtctagggctcagggatgctgttggctctgtttgaatttggttagtctgagagatattaggagttgatgtggaaacacttgtgtcccccagggtggaggtggtactcatcagaggtgtggctttcgatgtctctgagtcagctaggacagaggattgtgatttatgtccagacccggaagtccctacattggtcactgcggtgtttgtggaatgatgcatggcggcttctgtgtgtgcagtgtctttgtaagtggccggtctctcatgagtgatgctgctcaaatttggaggtgaactggttacagactctgggcttgttgtgcccaacacatctgtggttgtcaccagaacagaagtaggaagtgcagtcacaggaagaggagaggaggggatgctctgtggtgatgtggaggaaacaggagaaggggatgtcatggcaggtgaagacatcagggaagacacagagctggtttcttccacagggggagttgtcatccatgacacattcccaggacccatgcccatgagagtggtcacctctgagtatgggaatccctgagtcacagttgaatgagtccctccctgggaaagtgtggttgatgtgtccaagggaagggtactgtgcgatgcagactcaggaggacttgcttgggtggtgatcgtcatttctgcagattttgtcttaatagaggaggtgaagaccctggggatctctcctgtgaaggtgtcaggtggcactgtggacttatcatggtctggggtggaaattttgctagaagagttgacccctgtactggagacctcagtaatagtaccagtggggactttggaaagtagaaaacttgtgtccgtgggaaagctggactcctgagaggtactggtctctctcagtctaggagtcaagaaatatgttggctctctcttaatgtttgtagtctcagaggaaccatgcactggcattgatgtggaaggagctggatctcccacagtggtggtgataaccatttgagttgtggctttgggtgtctctgagtcagccagtgcaggggaatgggattcatgtccagagttgttggctttcacattggtctcttctgtgtttatagaaggaaaaatttcctttgtgtctttactgtctttagaagtggccagtatcttatctgaggtgctgctgaaatttggaagtgagctggtcacaggttccaagcgtgtacgtaatatgtctgtaatcttcactaggccagaggtgagaagtgaagtcataggagaggagagcttatcctctggtaaggtagaagaaatcagggaaggtgtggtcattgcaggtgaggacagaaaggaagagggggagctggttttatccacagagggaggacttgtccatgatacatcctgtggaattctgctcataagagtggtcacatccaattgtgaaaatccatgagtcatagctgagtggatccctgcctggggggttgtatttgatgggtccatggtaaaagtatcctgtgatgtagccccatgaggacctgtttgggtggtgatggttatttctgcagattctgtcattattggggaggtagacagcctggtgttggtttctgtggagatgtctagtgacactgtggactgatcagggccagggaaggatgtactgctagaggaagtgacatctgtcctggatacctcggtagtggcaccagtgagctctttgtaaggaacagtgcttgtctctgtggacgaggtgatctcctgggagatgctggtctccctcagtttaggagtcagggaggaagttgtctcagtctcagttcttgtagtcttagaggatttaggtattgatctggaaattgtggtgtcttccatggtggaggtggtaacatttggagatgtgactttagatggctctgggtaagctgagacagtagaatgtgattcaaatgctgaaccggtggtccccacattggtaactactgtgtttatggaaggatgcgttgtctctatatctgtggtggctgctgaagtgaccgatatgtcatccaaagtgttgctcatactttgaggtgaactggtcactgtttctaagcttgtatccaccttgcctgcggtctttaccagtgaagaagtaagaactgaggacatagaaacaggagaggaggtactgtgccattgcggtgtgaaagcaacagaagaaggtaaggttgtgacaaggacaggtgcttgagaagagggagagctggcttcatcctgaaagggagggtttgtctgtgacacgtccttgacatcattgttcattgcagtggttatttttgagtgggcaaacccctcagtcaccactgatggagtccctgctgaggtttccaaggttgatgtgtctaaggcaagtggaatctttgatgtagctccagaagaccctgtctgggtggtggtcatgtgggtagatattgtcatgggaggagagtttgaaagtctactgctggctactgagaaaatatctgggaactttgttgactgagcaggagttggtatgaatgttgcatcaaaagaggggacttccatttttgtggcttcagtaatagcccccacagacacattggagaggatgatgtttgactctgtagttgagttcatctcctggagggtgctgttctcttttcgtccagcagtcagggaggatgttggctctccctcaatgtctgtggtctcagaaccaggtattgatatagaagcaagagcgtcccccatgctggaggcaggaaccattggagatgtggctgtagatggttctgagctgactgggagagtggaatgcagtacatgtgctgaactggcagtccccatattggtcactgctttgtttatggaaggatgaatagtctctatatctgtggtggctgccaaagtggccagtatctcatttgatggattgttcaaattttgaggtgaattggtcacaggttccatgcttgtgttcaacatatctgtggtcttcaccagtccagaggtaagaactgaagtcgcagaaacaggagaggatgtatgttgcccttgtaacgtggaagtggcaggaggtatggttgtgaccaagaaaggtgtcagggaagagggatagctggtttctgccacagagggagggcttgtccaggacacatccttgggacctttgcttatgagagtggtcttctctgattgcataaaatctggagtcacagctaatggagtctctgtcaagtaaggcatggttgatgtgtccaagagatatggaccctgtgttgcagctccagtaggacctgtttgggtggtgatggtcactcctgaagattctgtcattatcagagaggtggaggggttggtgctcacatctgtaaatgtgttggtagaagttataaactgatgagggcttgagatggatgttccgctagagaaagtggcttgtgtcttggtgacatgagtagtagcatcaccactagacacatgggtaatgacagtgcttgtctctgtagcagagctggccacctgggatgtgcttctctcctgaagtccctggttcacagaggacactgtctcaatctctgtggtctcggaggagccaaatactgatgtggaagaagtgatgtcccccatgatgtgggaggtaaccaatggagatgtggctttggatggctttgtatggcctgggataggagaatattcagaactggttgcctccatattcgtcactgctgtgtctgcagaatgatgaattgcctttgtatctctggaggcttcataagtggataacgcctcacctgctgtactgctcaaattgggaggtaaacttgtgccaggttccaagcttatcctcgacatgtctgtggtcttccccaggccagaggtctcagacaagaaaactgaggtcacaggtggagtagaggagggactgtgcccttgtgatgtcaacaaaatattggaaggcgaggttgtagcatggataggtaccagggaagaggaagagctggtttcttccacagagggagggcttggctgtgatgtatcctcaggacctttgctaaagagagtggtcttctctgagtatgtaaatctctgagtcgtagccagtggagtccctgtccaggaggctgtggctgatgtatccaaagtaggtgcacttagtgatgtagcgccaggtggacttgtttgcatagcaaggatcattcctccagattctgtcatggcaggaaagttagacagcctggtgatggcttctgaggggctgtctgacgacctcatagactgggcaaggaatgagctggatattctcttagaggaggtaatttctgttctaggccccttggtgatcgcagtggaacctggggaagagataatacttgtttgtgtggttgagctggtgtccatgtaagggctgacgtccctcagttcaatagtcaagaaggaattaggctctgttctagcccttgtagactctggccatgtggttgttgacatagaaactattgcttgttccctggtggaggttgtaaccactggagatgtgagtttggatgacgctgagtgggctgggatagtggaatgagaagcatgttcggaacttgtgacccagcctgtggtctctactgtgtttgtagaagggtgaattgcctctttgtctgtggtggactcagaaggggcaattctctcatatgggctgcttttccaacttggggatgaagtcgtcccagattccaagtttatgtccagcgtattcagggtccttaatacactggaggagctggtaacctccttgatggtatcttctgagacagaattcatcatctcagtgatccaaggtgcacttggggttgatttttctttctcattccaggagtcagatgtagctcttgcctctgttgtaagagctgtctgcccttgtctctgaaaagttgcatctggagtttttgctgtgtgtgggatcacatccagagttgttgctgctgatctgggcacctgccctggatgtgcagaagtggtggtgggaagctgagtggaagtctgctctgcctttttgcttgtgggatctggtcttgaaaaagtaactccagagctccttgccattgcagctggtgtgactgcacttgtaatgtgccctatagagaagggcaactgtgaggtagctgggctgatcatggtttccaaagtgagttcctggggagttgtggccccctgaggagctgaggtagtggctgtggctgatgacagagatctcccagtgtcccagtcaagagtggacagagaatcaaacagaaaagtggacaggggcgtatttgggtcagtctttgtactagcatgatctgtagaaaccattgaaacaggcacatcttctgcttctgtactactgggagtccaacttgtacttaaaatgtcaggaactgagatgctcatcctctggacacgagaaaaagttgagatgggagtagatgcagttgtgtctgaaggactcaatgttctttcacttgtactggtctctgtctttacagctgaagcatcagaggatggagtgaccaggctggttccaatgacagttatacggccatggggagtagacatggagtctaattcagtgcttgaggctaagaatgaagttgtatgcattgtggaaattgttccaggagatcttgcaactttcaagtttgaagtcatgtctgtgacagtccaggaatctgatgcagctgtggaagaccaggtggaagggtgttctgtagaagttgtgcgcctctctgtggccggggtgctgtccatggtactcatacccacttctgggttgggtgtggtagttgagattgagttggttcccatggtggtgatggtggtggagatacctggagtaggagctgtggttacgtccaggatgctcacttccgcaggagatgaagtctgagatagatgcccagcagtaggggcaatgtcacttttcactgcacttacattggccctcagagtctcaagccctattgaaggagatgtgacagatgacgcagagcttgtttttcctcctgagggattggtgaggcttgtaatgccttggtctccagagggcagagacactagtgaggtggtttgtgctgtggaggtgatgtataatgtgtttgtgacatcaggagatgcaccaagggtgatgtcactcccagatgtctgatctgaccaagaactagttgatgaataagcctcatccacagatcgacttgtctgttgttcagctgccattatcttattattcaggacagtggagggaatggctgtggtgcttacccatgtctcggttttatgtttggatttatctgtcaatgagctcacagagtttgggctggttacagggtcttcaaggatattggaagatgtgctcagagagacatgtgtgtcccctgtggtccctccagtagagccatgccacatagagaattccattccagttgtctttgaaaccagttctggactgctttgctgaccagtccctgtgatgcttctagcagttggtgactctagggagacagaggacattgtggccagtgactgcctggtccctcctggagttccagaataaaggttggtccaagcctcaggtggggatggggagagggagaccctttctgtagccaacatattttctgttggtgacttggttggtgatgtggttcctgtgggcaggtgagagatgctggtgctgccacttcctagggctgtggactgaagggtgactggttccactgtggtctccatgggaacagttgtttctggagtcttccaaggagaatttctcacagtggacctgatctctgggctgatgctgggttccttggagctcatgattttgagagtggtagacatttctgggcttcctggggatgtgcctgtgattagaaagtaagtcagtggagtatatgcaaatggtacagaagatgaagttttttggtttgacactatcattcatttcctcccgggatttcaattaaaactatttcctccttctctgggaaagaaaatgttgagcttttaattctcacactttaagcctctggacaccagggaacacattaaacattccaagggagatggtgaagttagagctttgaccatctggcttgctcaggagaaattatcacctttagctcagtttttccccatgccccatataaaagggctctttgcataagggaggatgtgatgaaccaggacttcacccatgcaagaggctacccccaaactatttccacttttgtctttggagcttgcccttgccaaaccaatttcagcttccaactttcagcctcctctaggttcccccaaatcttagttcactgcaaagctacttaaggatttgagaagaaagaggataagggagatgagctcattctttctcgtcaccttcattttctttcaaattcattcctccctctgaatcctttccctgtccttcaggaaaataacatctacctgtcaaaggagtgagaaaaatgtgacatcccaagagcactcctagggaccatatttcacatttttctaagcaatttggcactgccaaggacttcagcccataatcccttcttccgtagtaacaaacgcaacatttgccatctcaggttcacctaggccctccctgtgaacacagtgatggtctctgatttagaaagatccttcactctggagcagaagaaagtacagaaagaatcgactctgtagcattctctcctgctgaattaattggctattgatcatgtaaattagtaagttgaagcaacagaagtgttcaattagtaacatctattggggaaaaatgatcaatatcctcagagaagagtgtcaagaagtcaaaggaactttttttttttttagatggagtcttgctctgtcacccaggctggagagcaatggcgtgatctcggctcactgcaacctccgcctcccaggttcaagtgattctccttcctcagcctcccaagtagctgggattacaggtgtgtgccactatgcccagctaattttttgtatttttagtagagacagggtttcactatgttggccaggctggtctcaaactcctgacctcgtgatccgcccaccttagcctcccaaagtgctgggattacgggcgtaagccaccacacccagcctaggaacctattttaaaacctagtccttgctgggtgtggtggctcaagcctgtaatcccagtgcttagggaggccgaggtaggtgaatcacttgagtccaggagtttgagaccagcccaagcaatatagtgagaactatctctacaaaaaatttaagaaatacacacacaattaaccaggctaattggtgatgatcacctgcagttctagctgttgggggaggctgaagttggaggattgcttgagactgaggaggctgaggctgcagtgaaccatgaacacgccattgcactccagcctgggcaacagagggagaccctgtttcaaaaaaaaaatgcggtctaggctgggcacagtggctcacacctgtaatccctgcactttgggaggctgaggtgggaggatctcttggagccaggagtttaagaccaccttgggccacatagtgagaccccatctgtacaaaaaaaaaaatttaaaaaaacaacaacaataagctgggcatagcacagaggctctagagcccagtgagtgagctggactgctgcccagctactcaggaggctgaggtgagaggatagcttgagcccaggaatttgaggctgcagtgagtacagtgagtactgcagtaaatatacaccactgtactccagcctgggtgacagaatgagaccatgtctcaaaaataaatgaaagagagagagagagaaagaagagaagagaaggagaggagagagaaagagagagagagagagagagaagagaaggagaggagagaaagagaggaagagagaaagagagaaagaaaggaaaagttgctagcatttacttataaaataatgaaactgaagccttgtatattttttcttcccagaatcaataagcagcacttttagtcagcagcaagctgtcctcccaccttggcctctcgagtagcagggactacaggcctgcacgatgcccaacttattttttttaaaaaaaatttttttatagaggtggggtctcactatctggtccaaattggccttaaggcttgggtgaaaaaaattaagtaaaaaaataaaaaatttaaaaagaacaagagaaagaaagaaagagagagagagaaagaagaaagaaagagaaagaaagaaagaaagaaagaaagaaagaaagagaaagaaagaaagaaagaaagaaagaaagaaagaaagaaagaaagaaagaaagggagagaaagaaaagaaaagaaaagaaaagaaaagaaaagaaaagaaaagaaaagaaaagaaaggcttgggtggcattagcagagcagaaatggaaacaaggtctatatttacctgctggactgctccccgtctcctctgctggggcaggccacgtggaatttccttgtgctgcctggcttgacatctttatggtggtcactagcgttccatcagttgctgaaagaaaagggcaataggaaggtttagctatccattacttcagaatgtcagtttttgagctttctttacattgactgatctttctattttgcttcaactcagaggctctagagcccagtgagtgagctggacagctgcccaggtgacctcccatcaaacactagtctaacaggacatggtagaaagcagacaccaggcaccgtcaccagaaagactgacagatctcagatgggaaggggttcattttataagtaatcacaaattaaaatgtgacaagtggccaggcacagtggcttgcccctgtaatctcaacactttgggaggtcaaagtgggaggattgcctgagcccaggagtttgagaccagcctgggtaggatagtgagacaccatctctacaaaataatttttaaaactagctgggcatggtgatgtgcacctgtagtcccagctcctctggaggatgaagcaggagaattgcttgtgcccaagagttcagggttgcaatgagctatgatcactccactgtactccagcctggatgacagagtgagactgtctctttaaaaataaatgaaataaaatggagtaatattctgtttagagcatggattcttaacctctttttattataggtccctttgacaggcttgtgaaccatatgaattcctttataaattaaaataaaaatatagaataaaacataaaataacaatataaaatattagattacaaaggaaatcattgtggataaagaaaatctggtacacatacacctcggagtactatgcagccataaaaaagaatgaaatcatgttctttaaagcaacgtggctggagctgaaggccatcaacctaagcaaaataactcaaaaacagaaaattaaatactgcacattctcacttataagtgggagctaaccaatgggtacatgtggacataaagatagaaataatagacactgggactccaaaatagaggaggctgggagtgaagtgaggattgaaaaactacttattgggcacaacattcactatttggctgatgggttcactagaagccaaacctcatcattatgcagtatatccacgtaacaaacctgcacatatacccctgaatctaaaatttaaaaaacaaaggaaatgattatattgaaatgttgttatcaagatcttaataaacaaatgtaatacaataatacaggcacttattttactaactcattaaataagatctattgaaaagcctaataaccactataattatgaataaagtcgtacatgatttttaaaagtgcttgcaacaattgtcataggatatgaaagtgtccggaatttctgttgttggcaaaggcacaggcactgctaggattaatgtggtttgttttgttacctctattcatcaataaaacaaatgctaaatttcagttcgaggttagcaaaaataaagatgtagtttacaaataccgcatgttctcactcataagtgggaattaaaccttgagtacacatggagacatgtgaattgagggtggaggctgggaggagggagaggattaaaaaaaatctactgatcaggtactaggcttattacctggctgatgatgtaatctgtaccccaagcccccatgacatgcaatttacctatataacaaacctgcacatgttccctgaacctaaaatatttatattttcaaatataaaagtttaaaaaataaaaaagatgtagtttatttccagattcatccccagcacacttggggaaggagcagggcattcttactttcaaccaaggaggtcttggcaggaactgaaatagagcttgcccatgtttctggagaactctttcttctggctgtgggttctgtgggagaagagacaggtaacaaggatgttggggtctcagatggtgtgaaggttaacgtctgtgtttcagctgttgttccctcttcttctgcaatggtctggcttgaggttaactcaggaggctcctcctgggacatatttagagtggatgttggagaaagtgtcagagctgaagtctgaagatgcaccaatatgttgggctgccttgccatggaaggcccaagaaatagtgaagtctttctggaggtggatgcagtgggggaaaggaagcttgtttctttctcagtggataggcttatgggagaggaactagaaccagaccttgctgcttgacctgtgctgaagagagttgtgagttttgatgcaagagaggtcgatgtcatagctgatgatgccttgcttgggtctggataagacatgctctctgaggcatatctagggtcccctgttcctgaagtggggactctgggttcatgccctgccatagaaggggaggcagatccctcaggggtttcagtaaaacctgttgattgaaatgagcttgcacttatggcctttgtggaagtcatcatccttgcccttgggtttttttctggagacttggacagtgaggaagatgctgtgcttgcatctgagtctggaatggtgttcagggactgtccaggagttggtaaagaagcggacttagtatccaaacttgggacctcagaaaactcaaatgtcaaggtagactgtgggatcccccaagttgggggagctgtagtcagtgaggcaaaggcctttgatgggcttgaggaggcagagacaggtgttaggaggcctgactcagcactggtgggcttcacaggtatccctttgggtgctgttgattgagtagctgtcagtctgttcgtggtgatttcagacatggctgtaacctcacctgggttcatggtcagagggagagaagaaaatgttttggttccagttgagtgagtggacccacttctgattcctccagagctagccataccctggcttcctgtggttagtggcatcacagatgccctctcaagcccagctgatgagtctaccaaagccgttgtctctgagttttcagaactctgactgaatacaagggaaccagtagttcccgcaggcaaagtagaaagtgccactgtgatcgaaccttcataggttgtattccgtggagcaacaatcttagagggggaagtggaagaaggatggagtggactttctgttactccttggatagtgattccagggatgctcctatctgggttacttactgtcttaagaaccagtgcatcaccatttgaggtctctgacatggtcagggtagtctctgggactgtgccaagactatccgaagctatagtcaccagtggggtggaatcaaaggatgtagctaatgaacttgttggctcagtggcagtgagagggatggctggagtgtccgggagtaaagtagggaaggaagctccagacagagtccccgtacttggaaatttagaaggtggcgtggacacagttgaaaacaagatggtatctgtgaccaaaatctttgaggtaagtgttgtgtctgaagtctcagtgactaccaaaaggctctcaggagtagctgaagtttcccagtttgctccagaggtgggtgtagttggggtctgtggtgaagaatgaatggctttgctttcactcgtagtgagaagactggcttctgatgtagcactggatccagtgaccactgctgctgagagatggggagtgaaggcagtggctggttcaatagttgatgctagaagtgagtgtgcctctcctgcaggacttgtcttgagaaagcccatggcaggtaagtcagtagtactgcctacactggtccatgtacctggtgctggaacagaagtcaccacagaattgctagaggtaggattttctccggaggcagtgtcagtgctgaccatggtgctgaaagttcttactggtctagaccaggctaatagggccgagcttgtctcgacagggtgggtgattgtaaagggtggtaaagtggatggagtgccacccacattggagcccccatcaagagaataggtgttactggaaacagatggagaggtggctgtatttgtctctgttgtagatgtgggaacctggggtctatctgaagagaagagagatggggaggaacttgctgtcattcctgagatgctagtgggactgatggaggctgttttagtgacatccatagttgaagaagctatggaggtgttgatcagatcagaagaagaactgctatctgaggggagctcatttgttttccgtgcgtcaaggatatctgaggtttttactgtagtttcattatccagtgaaactgtgctggtctctgtgaaactagcagtgagaactatgggggaagtggttggagcagcagaggtgattgtccttctctctcccagtgtaatggagggactggctcctgtgggctttgtagacatagctgaactcatccaatccccaggaataggtgtcactcttgaagtcaactcatgagtgagagatgaaatggttctaaatgaatgagttgtcttttctgggaaatgtgagatagttgtcacttcagtatcaggggagggggaaaaggagacagtgggaatactctcagccccatctgaaggtgtgtcaattacatctgatgctactgtggacaagccaggtggacctgcgctgtttactgggatgcttgtttctgtattagtagttggatgggaccccaaagggattgacactgtccatggatccttgttcattctaaaggaaaccaaagactctgaagtgggcagggatattgtcctagttaatttggtccctgctgaagaggctgtgcctaaactcgggttagcagtactctcagatgtaaggccagaaacatctgatctagaagttatggccattggaagagggacttcagagctgatacttgcccccacaggagtctcagaaagacctgtgaccgaggatgcatcagtgttcaaagtactcgcggctgtattctggggaccatgggtctctgtttctggatttctttgcttagcagcagatgtggatgcagctgaaaagagtggaaattcagtcgtagttgaacttgggtttgaaaccccagaatggcctgaggacagtgcctcagataaactagtacttggccaagttgtagtggggagagatgtagtgaggtcccatagccaggaagtgattgcattcctcctactgattgtggaatccaaggattcaagtgaggctgaggaatatggagaggatgtgctgcttccagaagagactgaattctcatgggtaggggaagcagacactgccacagagttgacatatggagttgactgtgtctgcacagaaactttttctgaagaaactgcatgtagtggttgagtggactgttcaattgtgcctgtactggtccatacaattgttggtggggtgatgggagaatgtgtcatgggtgctgagttgatgtctggtcctgaggttatgcctgtagaaatgacttcttccactggaatggatgaaaaaggcaatgttaagcttatggccctgtttccaggagtggaagtcaaagtggtctctgctccaggagctgaggtctcaggtcggggatggattgaagaagacacttcactcttctctgtgtaagtcatggaagtgtgagtgctgtttcccatagacagggacttagaagaggtatcagagccgttttccaatctggaggctctagtgacaccagtattcaatgacctgtcagtggccaaagtccctgcagagctggtgtgcaccccatggctgaggtcaagtgaatctgtggtattgggggcattactgagagtgagagaaatccatggtgtcacctccattgatggagttggagatggaagatccatagaggcagttctgagtttttcttttcctgtattttcagtgcttcccaaagctgtggacataagggtagctgagctggactctgtccttgctgaagacttggagatgtctgaggtcataactgtggtgacctccttggtccaaaatgtgctgccccctatgaattccacatcaggagttgtaggagatgaggttagagggatgcttgtgctcatctggcttccttcagcatagctgggttcaagagaggaggagagagctgtatttccctgtgtgttcagccttgggctgcttcccttactagaatctgtgactccttcagtagttgactcagaaaggacagaggaaactcttcctaatgactggctgatgcttcttcctggagcactagtaacaaggagtcccattgtcccagccatagagacagtggctgtagaacttcttctttccagtgccatgtttgtggatgtctcagctggggaggatgttcctatgggaaggtgggctatgcccagggtgactccactactactgctccctgttgttgtgttgtccatgggtggagtggattgaatgtttgttgggccagtctcaatctctctggacagtgtgtctgtagatggtttccaaaaagtggttgcctcagaggagcttctcccttgtgtcccgagctcagggtagacttcagtaagatgggaaggggatgctgaggctggtatagatgtttgatctttgagtgactgtgtcacgtgagtaggactcatcgttgcagaaagggtgtcctgtgcttgtgttgagtgttcaatcacactggtccacgtggttgtcagtggggtgataggaacagttgttaagtccccagttctgcccaaactcctgattcctaggtgctgatccaacgttgttgaatctgtatttctaatggcactggtatctgcctctgactttgaaagttcatgagaaggtgtggacataggtggaaaaatagcaaatgtactcatgggtgaacttggacttgaaatatcaaggtctgttgaagccatttcctctgtcaaactggtactcagccatgttgccatggggagagtgattgtggtctgctcactgggagcaaggaccaggggttcccctgggacatcagaagttagttccaatgtgctgcttccaatggtaggggaggtagggattactacagagacaggtcctggagctgactgtgtctcaaatccagatgatttttctgccaattttgtgtaatgtaattgagtggagtgttcagttgtgtctgtgatggtccatgcttttgtggccggactggtgagattgggtgaacttgagattttaggacttccagagtaagcagctggggtggcggactctgtctttggatggttttctgtggttctgagtgtcctcactgagtggggtgtagagacctgagctgaacttgtatccttaggatccgtagtggtgatgtaggtggtggggtcccaggtactaccagtgttagtctctccaggagctgtcatctcaggtgaagacccagaagagtaagccattctggctgttgatacatgaatgtgggtctctattgaggggaaggtgagaggtgtgtaagagccaggttttactactgaagccatggtaagtttgatggtgcttggactttctgaactagcgtgtgctccgaggtggatgctgggtgtgtttgttgattcagggtaggtgctgagggttggaagtcccccttctgatgcctccaatgatgtggctggagatggagtgtccaagggaaccagggtgctttttcctatggcaccacttgttggaatattacttggtgtcaaggaagtcgtggaaggtaagttgggcatgttccaccgactagtttcaactgtgtccattatcatgcttgtggtgactctctgagttgaaaatgtggagctcattgtgactttgggagtaggagaagaaggagatgaggacaagatgccaagccaggtgcttctagcagagccaggatcaggagatggagggtgagttgcagtcatttgtggagtcagagctgagcttgttccatctctaggtattgtaatttctctggatgttaaatgatagacatcatcagaaaatgtgtcaacgaattggcttgtccttcctggagtgcttgagccagcagcatccatggactgagatggagatactgacattgagacactttctttggccatggtaaaatccatagatgtctcagaggaagctgtggttccaatgggcagatggcttgtgtccaatcttccttcagtaatgtagccctttccaattgggatgttggtagaagccacagccatagagcctgggccattcgtggtctctgttgtgaggatggttgttgatggttccctgatagaagttgcttccatggaactagttgctggagaagtgaatttagagaccattacagtagcagagagagaagtggcagaggttgaaacagtggttgttgctgaaggtaaccctgtcttgaatctgggactagtctctggccaagttgtgctttggggtgcagcagagtcattaaacgtgtctctattggtctgtgacattgttgccgtcccagtgaggtgagatattttaggaagagctgaaccagttgagtttgtaactgaggtactgctcgtagctctgagctcactcactaggtgggatgaagagaactgagctgaacgtgtaggccaggtgtccatggtggggaatactggggtagggacagaggtgctggccaaggtggtccttactctggaaacagaagtctcaggttgagacacagatggattcgaagtttcctctgtttcttctccactagtaaatagatgagtggaaggagtagatgaagaaaatgtggttttgactccagagacacttgggaggctgagagtgctaggactctctgacgattctgaagtcagtgtcccagttgggtggatgttaggtgagtctgtagtctcagcagaggtgctgagagtgaggacactccctgctgtctcttcccctgatggagatggatgagtcagaggggaagttgcatttctgactctttcaggacttgttgctgcattgcttagggtcatggaggaaagaacggctgagctgggctttgtctttgttgagatttcaggagtccctgtggtaatagatgaggtggctttgtggtgtgagaatgtgctggtcgctgacactttatcctcaagaactgaagcagatgacaacagaggaatgctggtgcttatcttggtgtgtcctgcagagtctggttcaggggaagagaagggatgtctagtgtttaatggagtcagtcccaggctggttccttccctgaaagctgaggactgtagagatgatgtctcagggatgacagaagaaaccattgtatatgatggctttgtccctcctggaggacttgagccagcagccgtcttgctcactgctggagacacggagactgggacaccgttcgtggccagagtcaaatctgcggatgtctcagatgatgctgtggctctggtgagtaggtgggttgtgccctggcttcccctggtgctgctgcctcctgtcattgaaatcccagtgggaacagcaaactgatgggtggttgggccagctgtggattctccgatgagtgtgtctgcagatgtttcttcaagccaaatcccttttgtggagctggtcttcagggtggtgaagccagagaccactgagggaacagaagtggtgataggggctgccacactggttgatgctgggggtctctctgttttcatgctaggacttgtctccacccactgtgtgtgctggggttcactaaattgctgagctgtgctttcactggtccatgatgatgcttttgaggtgctggaagtggttgccctcaggatgtcagagctcccgtgggcagctgtgctggaactctgcctcccagaggtgctgcctgtggttctgagctctcttgttgggtgggatgaagagacctgagatggacttctgatcttgctgtcaagagttgtaaaacctagagtggggaccaaggtggcagtcatttcggactcttctccaggagcagaggtctcaagtggagtcatagatgtattcaaagttccttctgtttcctttccactcgtggagtgatgggtgttggtctcctctgagactaaagtggtagatggagatgtggttgtcagcgctgaagtgctggtgccaccaagggtacctggacttcccaaccattctgaagccaaagtcttggctatgtgggtgctgggtatatccatggtctcagcgaaggcatggaaggtaaggatagtctctgctgtctgctttgtggatattgatggagtccccagagaggaaattgtgcttctgaccctttcggcacttgtttctgcattgcttagtgtcatggaaaaagggatagctgagttgggcattgtgctggctctggcctcgggcaccccaggagacagaggggaggtgagactctggcctgagaatatgctggtctctgatattttattatcgagaactgaagcagatgatgacaaaggcgcactggtacttattctgctgtgtcctgcagagccaggttcaggagaggagaagggatatccagtggttgatagaatcagttccaggcttgtttcacctctggaatttggggtccctttaggtgataggtcaaggaaggaagaataaagtgtcccaaatgatgggtttgtccttcctggagtatgtgagtcagtaactgtggtctcagctggagtcatagacactggggcattttccttggatgcagttgaatctgcaaatgttttcattggagatgtgatttttacaggaatatatcttgtgtcccagggggtctctgtgctgtcaccttcagttgttgaggtctcagtggggactgtgtacttctcagtgactgggccacttgtggtctctacagtgagtgtgtatgtagatgcttctttggtaaaatttccttctgtggaactggtcctggtccttggggaactcaatcctgaaaccatgcttgtagcagggtagttcctagagggagttccattgacctggggactcagcgatgggctggttctttgctcggagtgtgtcattcctctagaggttgactcagggagagcagaggacatcacccccaaagactgggtggttcttcccacaaccgaagatgtaggactggccaaggtcttatctggggaagtaaagggcagagtatgttctgtcaccacgattgcacctgtagatgtcttaggtgacaaggtggctcctgtcagtcctgaatccatttctggtgtggctttagtgctcctgctccctgtcatcaaggagcgggtgggagaagatgacccaggaaggcctgagggtttcagcatggacaggtcaacatttgcctctggatggaggtctaagaagaatcccctcagagagggtggcctctgcagagcttctgagctccctgaaactccaaaatttctcagggtgggagatatggctggggtccccgcatttgacctgggaaaacctgtgtctagaagagctgccgtatgtatggaggttgggggaattgtgcaacgcttctaattgagaagaccaaatctcagggagagaaaggaaaggatagttcaaccacagacaatttcctcaaataaacacctgatgatctcaattcttcccttcaaactttttaacggattctcagtgtctgcagaatagaatttcttagtgtatcatgtcttaatgatcctctctctctctctctctctgagtgtgtgagtgtgtgtgtgtgtgtgtgtgtgtgtgtgtgatgtcttagaaaccaggaaccaggctgggcacggtggctcatgcctgtaatcccagcactttgggaggtgaggtgggaggatcacctgaggttgggagtttgagatcagcctgaccaacatggagaaaccccgtctctactaaaaatacaaaattatttttaattttttaaaaataattttaaaaaaaattttaataaaaataaatattgggtgtggtggcatgtgtctgtaatcccagctacttaggaggctgaggcaggagaatcacttgaccctaggaggcagatgttgcagtaagccaaggtcacaccactgcactccagcatgggtaataagagctctgtctcaaaaagaaagagaaagaaagaaaagaaaggaaggaaggaaggaaggaaggaaggaaggaaggaaggaagaaagaaagaaagaaagaaagaaagaaagaaagaaagaaagaaagaaagaaaggaaggaaggaaggaaggaaggaaggaagggagggagagaaagagaaagaaggaaggaaggaaggaaaaaaagaaagaaagagaaagaaagagaaaggaaggaaggagggagggagggaaggaagagagaaagaaagaaagaaggaaagaaagaaagagagaaagagagagggagggagggaggaagggaggaaggaagaaagaaaaggaaagaaagagaggaccgagggagtgaggaagggaggaagggaaagaaagaaaaaaagaaagaaagatgcagatagagcccctacctacacccccatgagatggagctaatgctcagtgtgtgatactggcagatactaaggctcttgaattgagaagtggaggtcagagaagacacggcacttctgttcagatcagagcaggggcccacagatgcactctcaggaatcagtggaagttgctcttgattaaaatctcatgaccctggcctgctgggcgtggtgtctcatgcctgtaatcccagcattttgggaggctgaggtgggcagatcacgaggtcaagagatggagaccatcctggctaatatggtgaaaccccatctctactaaaaatacaaaaaattagctgggtgtggtggcgcccacctgtaatcccagctactcaggaggctgaggcaggagaatcgcttgaacccgggaggcggaggttgcagtgagccaagatcacaccactgcacttcagcctgggcgacagagccagagtctgtcccaagaaaataataaataaataaataaaatttcatgacccagagggtgaagaagatgaggttgaatcatgtaaaggtctagcgatgctgatttaggacagaagaggaaaaaaaaaagaatttcctggcagctcactatctctggctgtttttgttgagggaaaagtgcagggaagatttttcactttgggcattactatgatttgaatgtcccctccaaaactctgttgaaacttaatccccagtgtggcagtattgagaggtggggcctttaagaggtgattgggtgatgagggctctgtccgtatgaatagattaatccattcatgactaacccatggattagtgggctaacatgggaagggacttggtggctttaaaagaagctttaggccatgcatggtggctcatgcttgtaatcccagcactttgggaggctgaggtgggtggattacttgaagtcaggaattcgagaccagcctggccaacatggtgaaaccatgtctctacaaaaaaatacaaaaattagccagacatagtggtgcgcacctgtggtcccagctactcaggaggctaagagaggaaaatcacttgaacccaggaggtggaggttgcagtgagccaagatcgcagcactgcactccatcctgggtgacagattgagactccatctcaaacaaaaaaagaaaagaaaagctttaaaataggaagtgagacctgtgctatcacattagcgcactcagctgtcttgacgtgtgatgccctgtctacctctggatgccacagagtccccaccagcaacagggctctcaccaggtgtgcccctctggatttcaactttccagcctccatatctgtaatagatacattatttttctttgtaaattacccagtttcagctgttctgctataagcaatgcaatacagactaagataggcatggctcatggatttctctcaagatgaggcccaccttggttctaagctgcgtctcctaggaattgagtttttccctaggccggtggggtaagtgaaactataattcattcctcatgctttcccaatcttcttttctactcaggagctaccaattttatccaggtcaaaatgattgaagaaccacgtcctttgcccactgtgtaatgtttcttttgtttgtttgttttgttttttgctggttttttaaattataaattcgtttattttttattttttattttttttgagatggagtctcactctgtcacccaggctggagtgcagtggtgcaatctcggctcactgcaacctccaccttccgggttcaagcgattcttctgcctcagcccctggagtagctggaattacaggcatgtgccaccatgcccggctaatttttgtatttttagtagagattggctttctccatgttgggcaggctggtctcgaactcccaacctcaggtgatccgccaaagtgctgggattacaggtgtgagccaccacacccggcacgtttcttttagatgctggatattagacctttgtcagatgcaaagtttgtaaagcttttctcccattctgtagattgtctgtttactctgttgatagtttcctttactgtgcggaagctctttagtttaattaagggcctattggagggtggagggtgggaggagggagaagatcaggaaaaataactaatggatactaggcttaatacctgggtgatgaaataatctgtaaaaccaaccccaatggcaaaagtttacctatataacaagcctgcacatgtacccctaaacttaaaataaaagctaaattttaaaaaagaaaataaaagtcttctgatcccaaataaaacaacttagatgcaaaaaagtgctataagacatatacattattagctcactcttcttctgaactaagagttcctgctgggcgcagtggctcacgcctgtaatcccagcactttgggaggccaaagcgggcggatcacctgaggtcaggagttcaagaccagcctggccaacatggttaaaccccgtctctactaaaaatacaaaaactagctgggcgtggtggcgggtggctgtaattccagctactccggaggctgagacaggagaatcacttgaacctgggaggcggaggttacagtgagccaagatcgcaccattgcactccagcctgggagacaaagagcagaattccatctaaaaaaaaaaaaaaaaaaaaaaatccttccaagagagtcctgaggagagcagattacttgaggtcaggagttcaagaccagcctgaccaacatggtgaaactccgtctctaccaaaaaatacaaaaattagccgggggtggtggcaggcgcctgtaatcccagctactcaggaggctgagacaccaaaattgcttaaactcgggaggcaggggttgcagtcagctgagattgtgccactgcactccagcctgggtgacagaatgagactctgtctcaaaaaaaaaaaaaaaaatcaggggttataggctgggcttcctgtcccccaactactctggattagaatctcaaaacaagataaagattagaattgcatacttgtacatggtcataaagctggaggttaaataaaaagttagggagccctgtagctggggagcaaactccaacacaggcgtcccttgcacttcccctatggaaaagatcaaaaatgttcgtcttcaaagagattaacaaagctccgggagaccataacaatgtggaggagatgagattggagcatacctgcaggactgattgttgatttttctaccagagggctgcctgttggccatactgaggttccatgtggggatgacgaattctccccaggctcgtgagttcctgtgaggagaaaaggatggaaagagcacctaagtaaggaagctcagaacagggcatgatggttcacacctgtaatcccagcactttgggatgctgagcagtaggatcacttgaggccaggggttcaaatccagcctgggcaatatagaaagaccccatctttacaaaacaatttagaaaattaaccaggcgtggtggtgcttgcctgtagttccagctactcgcgaggctgatgttggaggaccacttgaaccaaaaattagccaggagtggtggcacgttcctgtaatcccagctacttgggaggctgaggtaggataattgcttgaacccagaaggcggaggttgcagtgagccgaggtcatgccactgcactccagcctgggcgacagagcgagactcggcctcaaaaaaaaaaaaagaaagaaagaaagaaagcatgatttgtagaccaaaaaggaattggggaattggggatgacagtaggtgaggcattccaggttaaataatggctttgacccaagtaagacatgagaacatgatacaatgggagtccttctaccatcttcacagattgttttgcaagtagagcatcagcatgggtggaagtagctacaccgtctacattgcattgactcaggaatggcacaggagactgtcctcaatgactgaatcactgagccaggagtagctgtggtctcagctgggagaatccatactcatggctgtattcatgactttaggaggctgctgttgtgaatcatctggatccactatgtggtgtggctgttgtggattttgcaaattctgctctgggtagacgtggcctggagggcagtggaggtggctgttgtccccatggtgatgattgctgttgacatctaccttgcaaaggtcgcctcagtgatgctatttgttgggcaatgctgggctcattggttcctctggtgacgacaggctttctggtgctttgggcagccaggctgtcactgatgtcacacctttgggatgttcctttgagtacagaatgtgctctgatctttccctgttgcatcgctctcttgtctactgggtcaaaacattagcagagaagatgctacatgcaggtgttatgtggagtgccttggtcctcaccacaacctggggagacaagtgctatccttcccattttacagctgaagaaactgaagtctaaggaggtgaaatgacaagcctcaggtcccagaaccaggaagtggcagagttaggattttctttagagagttaacaatatatatatatattttttttttttttttgagacggagtcttgctctgttgctcaggctgaagtgcagtggtgtgatctcagctcactgcaacctctgccttttgggttcaagcaattctcctgcctcagcctcccgagtagctggaactacaggcatgtgccactatgcctggctaattttcgtatttttagtaaagacggggtttcaccatgctggccaggctggtctcaaactcctgacctcaggtgatctgctgcctcggcctccttggattacaagcatgagccattgcacctggccgagttaacagtattttctttagagagttaacaatgtttttaaagtaaagttaacaatatttaaacaccatgatataaagttaatatgttgctttagagatggggtcttgctctgttgcccagactggagtgcagtggtacgatcttagctcactgtagcctcgaactcctgggctcaagtaatccttctgcctcagcctctcaagtagctgggactacaggtgggtgccactatgcccagagaatttttttttaatttttagtagagttgaagtttcactatgttgtccagactggtctcaaactcctggcctcaagtgatccttctgcctcagcctcccaaagcactgggattacaggcactagccaccacacaccacacacagccagagttaggatttattattttattttatttatttatttatttatttattttgacatggagtccttttctgtcgcccaggcaggagtgcagtggcatgatctcggctcactgcaacctccgcctcctgggttcaagtaattctcttgcctcagcctcccaagtagctgggattacaggcacgcacaaccatacctggctaattgttttgttttgttttgttttgttttgttttgttttgttttgttttgtttgagatggactctcactctgtcgcctaggctggaatgcagtggcgggatctcggctcactgcaagctccacctcccggcttcacgccattctcctgcctcagcctcccaagtagctgggactacaggtgcctgccaccacgcccggctattttttttttttttttttttttttttttggtatttttagtagagacagggtttcaccgtgttagccagggtggtctcgatctcctgacctcgtgatccgcccgcctcagcctcccaaagtgctgggattacaggcgtgagccactgcgcccagcctaatttttgtatttttaatagagacggggtttcgccacgttagccaggctggtctcgaattcctgacctcaggtgatccgcccgcttcggcctcccaaagtgctgggattacaggcctgggccactgcgcttggcccagaattagaatttaaccagtagtttttgtagatgctacaccccgcgaggaagacacaagtgccccctgctggccaatccttttagtttatcttcttgtatgtatcagatttagttattatttacgtagctaaaagaatctcgggtctatttggttactttggttacctaatacttgacctatttggaaatagaaaaggatgtttcctgtttgtttagaggcattccaaaggttctacagacagtgatatttcactacctagtcatagccttgtccatgtcaagtagttcgggtgctttcttaccttgggtcctcacacattcttagttcttagctgaatcttctatttttgaaacagggtcttgctctgtcacccaggctggagggcagaggtgtgatcgtagctcactgcagccccgatctcttgggctcaagcaatcctcccgcctcggcctcctgagtagctgggactacaggcatgcaccaccatgcctggctaattttttctttttttaattgtagagatgcagtcttgtcatgttgcctaaagtgatctccaactcctgggctcaagcaatcctccctcctcagcttcccaaagtgttgggattacgggtgtcagccaccacgccagacctcagctaaatcttttctatctttgaaaatgctacagtacccgatgtttcctagaatttagatggcaagctgtgtcatagggacatctcgtgcaggaggggaaaagggtgaaggcatgacgcattgctgaacaagactagtagtaatacttagttggcggggggggcgggtcttgaaatttatggccgggcgtggtggcccacacctgtaatcccagcactttggggggccgaggtgggtggatcacctgaggtcaggagttcaagaccagcctgaccaacatggagaaaccccatctctactaaaaatacaaaattagccggatgtggtggcacatgcctgtaatcccagctactctggaggctgaggcaggagaatcgcttgaacccgggaggtggagtttgcggtgagccgagatcaagccattgcactccagcctgggcaacaagagtgaaactccgtctcaaaaaaataaataaataaaaattaaaaaataaatttggaaagccattcccaagggcatgtagccctagatgattttccagggagtctgaaaagcaatacttacgaagacagttagtcaatttgtaaccttagcattgactaggaacaagtagagcttgaaagggcagctgaggctgggcgcggtggctcaagcctataatcccagcactttgggaggccgaggcgggcggatcacgaggtcaggagatcgagaccacggtgaaaccccgtcttcactacaaatacaaaaaattagctgggcgcggtggcgggcgcctgtagtcccagctgctcaggaggctgaggcaggagaatggcgtgaactctggaggcagagcttgcagtgagccaagactgcgccactgcactccagcctgggcgacagagcgagactcagtcagtctccaaaaaaaaaaaagaaaagaaaagaaacgaaaagaaaagaaaagggcagctgaacccctggagaggcagagaatggggcacttctgtcaatcagcaccacagtggtagatgtctctgccccagttcctgtgggtaggtgggctgtgtgtgtatggagtcaggattgttgttctctagttcgaggaactgaatgggagataggaaggactatgctccccattgcccctccccagcccccagcacccattattctgctttctgtctttatgaatgtgatgactctaggaacctcacataagtgggatcatacagaatgtgtccttttgtgactgccttatttcacttagcacactgtcctcaacgttcacccacattgtagcatgtgtcacaatgtccttcctttttaaggctgaataatattccattgtgggggccaggagtggtggctcacgcctgtaatcccagcactttgggaagccaaggcaggcggatcacttgaggtcagcagttcgataccagcctggccaacatggtgaaagcccgtctctcctaaaaatacaaaaattaggctgggcacggtggctcacgcctgtaatcccagcattttgggaggccaatgccggcggatcacctgaggtcaggagttcaagaccagcctggccaacatggtgaaactctgtctctataaaaatacaaaaataagccgagcatggtggcaggcacctgtaaccccagctactcagaaggctgagacaggagaattgcttgaacccaggaggtggagattgcagtgagccaagatctcgccattgcaccctagcctgggcaacagagcgagactctgtctcaaaaaagaaaaaaatacatatatatgttatatatatatatgcaaaaactagctgggcgtggtggtgccctataatcccagctactcaggaggctaagatgggaggattgcttgaagccaggaggcggaggttgcagtgaactgagatcacgccattgtactccagcctgggcgacagagtgagactccatctcaaaaaaaaaaaaaaagaaagaaaaaaaaattccattgtggggatggaatatatttttttaatccattaatctgccaaaggacatttggatggtttctacatttggggcattgtaaataatgctgctatgagcaccggtgtataaatacctgcttgagtctctgttctgctttcaattcttttcaatatatacccagaagtggtgttgctggattatctggtaattctatttctaattttttttttaggaagcatcatactcttttccacagttggggcaccatttagactcccacccgcggtgcacaagtgttctaatttctgcacatcctcagcctcatttgttataatatttttatgttttcctgtgttgttttgtttgtttttgtagcagccacctaaacggatgtgaagcttacagtgctcacatggtgaataatctctccctccttcagcagtcacacttaactaattaatgtaagttgcatcctcataggatgcacattaaaacaattccagctttcaccagggttaggaagaggggctttgctttgtgtcactggcacccaccctcctatttctgacaaccaaaaatgtctccagatatgacaaatgtctcctgggagacaaaaatcacattcagttgataaccactgtttggaggcagcatgtaatttaattcagattttacagttactcggtcacatagggcgtttattcccaagacactggaggttcagagaggtttccttatttgtccagaaagtagcagaggtgggatttgaacccaagctgtccaatatcagtgtctcctctgttaactgctctgttgtgctgcttataaagtcatcatcccaatacaaggtcgggcgcagcggttcacgcctgtaatcccagcactttgggaggccaaggcaggcagagtcagaagttcaagaccaccctggacaacatggtgaaaccctgtcgctactaaaaatacaaaaattaacctagtgcggtagtgcacgcctgtaatcccagctgctcaagaggctgaggcaggagaatcgcttgagcccgggaggcggaagttgcaagagagtcgagatcgcaccactgcactgcagcctgggcgacagagcaagattctgtctcaacaaataaagggaacagaactagactcctaggaaagggaggacctaacacccagaggcaaggagcaggaggcagcaggaagaacctcagcagggctcctgccttgaaccccttctgcctgcctgggctggttccctccaaggagacacctggggaatcatctcccagcaatgggaaacctgcctgtttatgtgacagggttggtggccacactcacagcagccccatcaacgccatctgcctctaggacactgtggatatggagagagaaggtgagcgggtagatgagagggtcagggggaggatgaggaccgggctgtctctcctgcctgctcctgaggaagccagtgtttgttcattttttttttcccctcttttgagacagttttgctctgctgcccaggctgcagtgcagtggttcaatcatggctcactacagcctccaacttctaggctcaagcaatctgtccgcctcagcctccctagtagctggaagtataggtgcatgccaccatacccacctaatatatatatatatatgtgtgtgtgtatatatatatgtgtgtgtgtgtgtgtgtgtatatatatatatttttttatggagatgggatttcaccatggtacccagactaatttcaaattcctgggatcaagtgatcctcatccctcagcttcccaaagtgctgggattacaggtgtgagccactgtgcttggcctgttttttgttttttgtttttgagacagggtctttctctgtcaaccaggctgtaatgcaatggtgcaatcatagttcactgcactctccaacttctgggctcaaccaatcctcctgactcagcctcctgagtagctgggactacaggcactcaccgccatgccagcctgccaatatttgtgagtaaggcagaagacacagagtttacttacacagtcctcagattcaaatcacctttctctttttttggggtggtggggagacggagtctcactctgtcacccaagctggagtgcagtgatgcgatcttggctcactgcaacctccacctcctgggttcaaacgattctcctgcctcagcctcctgagtagctgggattacaggctggcaccactacatctggctagtttttgtatttttagtagagaacatggggtttcaccatgttggccaggctgttcttgaactcctgacctcaagtgatccacccgccttggcctaccaaagtgctgggattacaaggtgtgagccactgtgcccagcccaaatcatctcttgaagactcattttctttccttcctaaaatcaagccaattgcaatcttcccagagcaggaaacaaaatgcacagtgggaggaaaatgaaagaagtggactcagtgggactcaagtcccaattactcactgtgtgatctggggcaagtcacttaacctctctgagccttgtctcctcatatgcccaacggggataacagcagagggctgttgagatgatgcagtgatgtgatccaccatgcagggtgaaggaattaggacttaataaactcctgttactgtttttttttggggcggtggggcggttttttgttgtcattttgtttttttatttttgttttttgtttgtttgttttgagacggagtcttgcactgtcgccaagctggagtgcaatggcgtgatctcggctcactgcaacctctgcctcctgggttcaagcaattctcctgcctcagcctcccaagcagctgggactacaggtgtgcgccactacgcctggctaatttttgtattttgagtagagatggggtttcactgtgttagccagaatggtcttgatctcttgacctcgtgatccgcctgcctcagcctcccaaagtgctgggattacaggcgtgagccaccgcccagcctgttactggtttttattatttattattatttaattattattattattattatttattttattattacctacccacggagctgatgagtgacgccggggaggaagggtcgtgggtcaactgcctggtggctccaagtgttccttggtctgtggtttgggcaaagaccactgcgtcgaaaggcagccctgtggaggaagaaccaagttggttatcccagcaggaagtagaacgaaaaacataaaaaaaaaatttcttctggacttgctcttctttccataggaatctctgcatagtgactcgttcatttaccatttcatttatttaatatttattccagaccctcagtcactcattcatccaaccagcaaatatgtcttgagcaccttttatacgacagctgattctgaaaccaacccgatagtctcatagacagtatttatatacctatttaaatacttgaaactgacatttgttattgtttaactattttaggtttggggctacgtgtgaaggtttgttatataggtaatctcatgtcacggggtttgttgtacaaatgattttatcacccaggtatgaagcctagtacccaatagttattttttctgctcctctctctcctcctaacgcttaccatgaagtagaccccagtgttttttattcccttctttgtgttcatgagttatcatcatttagctcccacttctaagtgagaacatgcaatatttggttttctgttcctgggttagtttgctaaggataatggcctccagccccatccatgttcccgcaaaagcaatgatcttgttcttttttatggctgcatagtattccatggtgtatatgtatcacatttgctttatccaatctgtcattgatgggcgtttaggttgattccattgtctttgctattgggaatagtgctgcaatgaacattcacgtgtatatgtctttatggtagaatgatttatatttctctgggtatatacccaataatgagattgctgggtcaaatggtagttctacttttagctctttgaggaattgccacactgctttccacaatagttgaactaatttacactcccaccaacagtgtataaatgttcaattttctccacaaccttgccagcatctgttattttttgactttttaataatagccattctgactatggtgagatgctatctcattgtggttttgatttgcatttctttaatgatcagtgatagtgagcatttttttcatatgcttcttggctacatgtatctcttctttcaaaaagtgtctgttttttttgttttttggttttttttttttgatacagtgtctcactctgtcgaccaggctggagtgcagtagtgatcgcgcctcacagcaacctccgcctcccaggttcaagtgattctcctgcctcagcctcctgagtagctgggattacaggcgtgcaccaccgtgcccggctaatttttgtatttttagtagagacagggtttcaccatgttggtcaggctggtctcgaactcctgacatagtgatctgcccgccttggcctcccaaagtgctgggattgcagttgtgagccaccgtgcccggcctttgcccactttttaatggtgttgtttgtttttctcttgtaaatttacttaagttctctatagatgctggatattagacttttgtcaggtgcatagtttacaaatattttctcccattctgtgggaaacttacatttgttttatctgagttccttcctcattaaaggacccccagtcctctcaaaaagtatcaaagaaaagaaactcagcagatcatcatatccagacaatgagatgtcagacccctcattcctcatgattgcttcctgacccctcttgatttcctgttttactacacgtagtcacatttcttccctgctatataaacctgtaattttagttggtcagggagatggatttaagactgagctcccattttctcactgcagccaaggagattaaagtcttcttccttggtaataatcgttgtctcagtgattgactttctgtgtggtgagcagcaggacctagcctggacccctggtgttttggcaacaattccaagtttggggcacagagtgaggaacaagacaagtctttactccctcaaaaagtttatgtccagaacagaaaaccaaatactgcatgttctcactcataagtgggagttgaacaatgagaacacatggacacaggtaggggaacatcacacactggggcctgttgggggttggggggctataggggaggtataacattaggagaaatacctaatgtagatgatgggttgatgggtgcagcaaaccaccatggcacatgtatacgtatgtttgttaacctgcacgttctgcacatgtaccccagaacttaaagtataaaaaaaaaagtttacatcctagtggagaaagcagacaacgattcatccaacagataaataattaatgtccttgcagagagtgaagggaattttgaagtcactctaccaatgggagagaagcataattttccatagagtcatcagggaagacttctcataggaggtaatatttaaggagggccctgagagatgagaaggtacttatcacaggggaaatgtgcttgtgatggagggaactatatatgcaaaagcccagaggctggaataaacctgacccactcgagaaatttcaagaaggccagggtggccagagtgcattgagaaagcactggagtgctttctggctggagtgtaaggcgaaaccagctgggtaagcagaggtcagatctaatgaggagaaagaggaggaagggttgtaaaccagtgatgtatgaagtttagattttcttggaagtgcaatggaaagtcacggaggatttgaagcaacgggtgagggttgtgaccaggttagcattattaagagataattctgccagaaagcaaggaagtgctcaaagactaaggagatgatgttacaaggacaaagaagaggctataaagtcctcaagattggccaggcaccgtggctgatgcctgtaatcccagcattttgggaggctaaggtgggtggatcacgtgaggtcagaagttccagaccagcctggccaacgtgaaaccccatctccataaaaatacaaaaattagctgggtaatcccagctacttgggaggctgaggcagaagaatcacttgaacctgggaggcagaggttgcagtgagccgagatcatgccactgcactccagcctgggtgagagagccaggctccatctcaaaaatggatgaataaataagcaaataaagtcctcaagatcagaggctatgacttcaaactatactacaaggctatagtaaccaaaacagcatggtactggtacaaaaatagacatatagaccaatagaacacaatagagagcccagaaataatgccacatacctacaaccatctgatcttcaacaaaactgacaaaaacaagcaatggggaaaggactccctattcaataagtggtgctgagataactgggctacccatatgtagaagagagaaaaaaaaaaacaaaaaaggaaaaagaccatgggatgtaaaaatgtgaatgactgaaattttggggaaacttttattggatgtgtattttcatacctacagccctcaccaagaaaatacacacaaacacacacacacacggtcctactgaatggcactaaattatccacatactcctgatagattatttcactccctacaaacttctgagatggaagaagccagcttcctagggctccagggaggagaggaatttatgataagatagagcaatcccagtttcttagactaactagccaaacccctgtcaacctaaatagcaaacagagacagactctctaaaggaaaatatgttcatttgggaatagaacattgcagtgggaatatgcatgccactgtaatatacgtgcctattcaggaagacaaagctttttagaggaaaaattgaggagaattgcataatagttttgaaatatttgtccttggctacaaagatcgataacaaggataacaccttttctgtagagacagcgtcttggaaggctgggcacggtggctcatgccttaatcccagcactttgggaggctgaggcgggcagatcacaaggtcagagtttgagaccagcctggccaatatggtgaaacactgtctctactgaaaacacaaaaattagccaggcatggtggcgggagcctgtagtcccagctattcaggaggctgaggcaggagaaccacttgaacccgggaggtggaggttacagtgagctgagatcatgccactgtactccagcctgggtgacagagcaagactccatttcaaaaaaaaaaaaaagagagagagagcaggctgggtgcggtggctcaggcctgtaatcccagcactttgggaggctgaggcggatggatcacgagatcaggagttcaagaccagcctggccaacatggggaaaccccatctctactaaaaatacaaaaaattagccgggtgtggtggtgcgtgtctgtaatcccagctactcgggaggctgaggcaggagaatggcggtgaacccaggaggcggaggttgctgtgagcggagatcacgccattgcactccagttccagactgggcaacagagcaagactccatctcaaggaaaaaaaaaaagacagacagcgtcttgggttcaagggatcctcctgcctcagcctcccacactgctgggattacaggtgtgagccaccgtgcccggcctgcaggagtattttttgcgtaaggttgaggtggcctttgtgcaaggttgtggcttttggaatcttttgtgatagttgttatcaggcataccagcatgagaaccctcctttcatggccctccgtgactctatttgcccccttcattcatgcaacacatatttattgcacaactactatgtgccaggtactgcaacaggctgcatttggcaatgtctgaagacatttttggttggtgggagtgctgctgccatcccgttgtagggaacctgggatactgtttagcacttgaccaatatatgggacagcccaccctacctccccaaaggattatgagacccaaatccattgacatttgtgctgggattgagaaacctcgcttcagtgggattggtccaggttgtagcatacagggttgttgccatggagacaggcagataacgaacctgttcagtgggttgagagcagcatccaaaataaataaataaataagagaatataatagaattaaaaggcatcaggggctgggcacggtggctcacgcctgtaatcccaacagtttgggacgctgaggtgggtggattacctgaggtcaggagtttaagaccagcctggccaacatggtgaaaccccatttctactaaaaatacaaaaaattagccaggcatggtggtgggcaccggtaatcccagctactcgggaggctgaggcaggagaattgcttgaacccaggaggcagaggttacagtgagccgagatcgcgccattgcgctccagcctgggcaacaagagtgaaacatcttctcaaaaaaaaaaaaaaagaaaagaaaaaagaaaaaagtattttcatcatgcatctataagcaaaactggtcacaatggtaggatggtactggtacactggtacacaatacattgcacactggtacacaatgtgcaatgtatttcttaccatggatcccagtctaaaaagactattagactttttagctaatagctaataattaatgttagctcctgcatcagctcatcgtctgataggcagcacctgccttcctccctacctcatctctttgcctcgttctctcaatactgggagtcactgagaaagaggatgtctcagatcacaggggagctgggtcagaatcactagggtcttacagacccagtctgcccagggtcaaagcccagccctaccacatagcagctatgtgcccttggacaggttgcataactaactgcgccttggtttccttttctgcaaaatggaaatgataataggacgtacctcctattgtcctccaagttgttatgaggatttaatgaattcatatctgtaaagagcttaaaagagtgcctggtacatgttagtgttccctgttagctattatcattatcatgacttgctctagaatagcacttaccccagagtgtaattctttttattattaggggaagggggcaatgtgggttcagagtcactgagagggggtggatcagagccaggataaggatgagaagcccggctcagattcactgtgtgttggggacagggttggcagagctgcaagtgctaggacaagtgcaccaaaacaggtctgacaaagggttaaatgaagcagatgggattgttcagggtgggatgaaaggtccagggagggtggggacaatcaggcaggctgcctccctgcaccgcagtgtttgtttccttgacaggtgggaggcccagctccactcaggtatgtggccagaccagccagggcagccccctggacctctcatcccaggcagagatgaggagagggacagggtggggccctccagcccaggatggccccggcccacctcctctctcccacccaggaagggctgagccactttggacaatgggctgagtcccctggccccattcagccccactggcctggcctgtccccacagggactgctggaggtccttggggggatgttggcaccaactgctcctttgtcttgctacttaccctagaaagaacaagctaagggctctcctccccaactgaggaaagcaggatattttgccacgagcggcaaaggaggacccctgctgccccagaggaagaggagggaaaacatatttacccacacatgcacacacacaaacactcatgcacactctctcacacttatgcacacacaaaaactcatttgcatgcatgcacacacactcttacacacggacacacatgcacgaatacaaacactcatgcacacacttaaacttatgtacatactcacacagtctcacacatgtgcagactcagtcactcatgcacacgctaatacacacacaaatgcacatacatatgtatgcaaaatacatatgcacacacacacagctacacactcacatgtaagcattcaaacacacccacacatggacacacatgctgaaaaacaagcacaccctcattcatgcacacccacacacctatgcacacatgcatacacacatgcacacacatattcacactcgcacacatattcacacatgcttatgcacacacgctcagtcacacctgtgcacactcagacactcatcgcacacacttgtagacacataggtggatgcacacacaagtatgcacgcaagcactaagttgcacactcacacatggacacgtgcacacacttatgcacattcactctaacacacacatgctcatgcagacacacacaaggcacacacagacacataatcacacacttatccacacgcatactcactgggcaggaactcaagtcctagagttctgggtttcatcctggttctgccccaactcgcttcactgagccccagtttccctacagttaaagcagaaatagcagcatacacctccccaggcattgcaacaaggtcaacctgagatgagctagtcgtgaatctgtaacaagaaccccacccctcaagtcttagcttctcagtgagggcctttccttgaacccactttattggaaagagcaatgtgcccccacaacacactccagcacccccgagtctccatcctgtttcttttctccttattcccttcttttctggagtgcaatggctcaatcttggctcactgaaacctccatctcccatgttcaagcgattctcctgcctcagcctcccgagcagctgggattacaggcatgcgccaccacaccctgctgattttgtatttttagtagagatggggtttctccatgttggtcaggctggtctcaaactcccaacctcaggggattcacccgcctcagcctcccaaagtgctgggattacaggtgtgagccactgcacccggcccccttattcccttcttaacaatgcatcacgtacttactctggttttggtttaaggtcatccccctttgctgaaagtgtcagctcagcagggatcttttgatttgctcacagccatcccctcattgcctagaacagtgcctgcacacagtaggtgctcaataaatactcattgaacaaattgaatgaatgaatctcttcaaaagtattgactaaagaggtaaagggcccttcttgatagagtaaaactgcaaagaggacccttccttgatatcagtgtgcaaaatctcacatcaagggacctcccctccacaaaaaaagaataataaagagtccttcttttccaggttgagaaaggaggggatgtctcctctcctgggaagagtgacgacatctctagaagccaggcatgaaagaagagaatgaaaactccatccggtgtggattgaggcagagaccctactcacttcctgtggttcctcaaaaaattaaaaatagaactatgagccgggcacggtggcttacacctgtaatcccagcactttgggaggccgaggcgggcggatcacttgaggtcaggagattgagaccagcctggccaacatggtgaaactccccgtctctactaaaagtagaaaaattagccaggcatggtggcaggtgcctgtaatccccgctactcaggaggctgaggcaggagaatcacttgaacccgggaggtggaggttgcagtgagctgagatcactccactgcactgcagtctgggcaacagaggaagactccgtcacaaaaaacaaaaaaagaaacaaaaaaaaaaaacctgtgagctgagcatggtgattgatgcctgtagtcccagtgacttgacaggctgaggcaggaggatggcttgagcccaggaattggaggctgcagtgagctatgattgtgccactgcactccagcctgggtgacagagcaagatcttgtctctaaaataaataaataaataaaagtagaactaccatatgatccagcaatcccacttcttggaacatatactgtgaaaggaaaataaatctcgagaccccaaaatcacaaagccaaagggaaaagtcaggttgagaactacatcaggcaaaccagcctcccatttcattcccaaataagatagctaccaaattgtttgtttgtttgtttgtttgtttgttttagacggggtctccctctgtcgcccaggctggagtgcagtggctcagtctcggctcactgcaacctccacctcccaggttcaagtgattctcctgcctcagcctcctgagtagctgggattacaggcgcgcaccaccacgcctggctaattttttttgtttttagtagagatggggtttcagcatgctggtcaggctggtctcgaactcctgacctcgtgatctgcctgccttggcctcccaaagtgctgggattacaggcgtgagccaccgcacccggccaatagctaccaagatttaaaaagcaacatacctccctcaaaatttgcccacaaggaaattctttgtgggactcaagatatttaccctaaaacagttctgttgaatttcaccttggcaatgtaaatggacagcttatctttacagatgcgggacagaaagtcatccctccgctcgcctgagagaaatgcatatctgattgcttcctctgccctattgttcatgtaaaaatgcagatttatggacccagactaaggtttaagtgactattcctctacctccctctcacgtgtaaactgtgtattcagtgaaaggctaatcaaagactcaaaagtagccgggtgcagtggctcacgcctgtaatcccagcactttgggaggctgaggtgcgcggatcacaagatcaggagatcgagaccatcctggctaacacggtgaaaccccgtctctagtaaaaatacaaaaaattagccaggcgtggtggcgggtgcctgtagtcccagctactcaggaggctgaggcaggagaatggcatgagccctggaggcggagcttgcagtgagccgagatcgcaccactgcactccaacctgggcgacagagcgagacttaatctcaaaaaaaaaaaaaaaaaaaaaaaaaaagactgaaaagtatgcaaccatttgtctcttacctacctataacctggaaaccggccccctccccacccccccgcccacgccgctgccacttcaagttgccctgcctttccagaccaagccattgtatcttacacatcttgattgatgtctcatgtctccctaaagtgtataaaaacaagctgcaccctgaccaccttcggcaaatgtcatcaggacctcctaaggctgtcacaggcgtgttctcaaccttggcaaaataaactttctaaatggatggagacctatctcaaatactttgagttcacaatccaaacaaaatcaaatcagtatctccaagagacatctgcaccccccacgttcattgtagcattattcagagtagccaagatatggaaacaatttaagtgtccaccaatggatgaacagacaaaaaaattgtggtttatctacagtggaatattattcggtctttaaaaagaaagacattctgccatatatgacatcatggatgaattggaggacattatgcgaagtgaaataagccagtcacaaaaagacaattactgcatgatctcactcacgtgtggaatctaaaaaagtcaacctcgtggacaggtgcggtgcctcatgcctgtaatcccagcactctgggaggctgaggcaggcagatcacctgaggtcaggagttcgagaccagcctgaccaacacagtgaaaccctatctctactaaaaatacaaaattagccaggcatggtggtgcacgcctgtaaccccagctacttggaaggctgaggcagggaaatcgcttgaacccgggaggcggaggttgcagttagccaagatcatgccattgcactccagcctgggcaacaagagtgaaaatccatctcaaaaaaaaaaaaaaaggaaagaaagaaaaaatgctaaaagagttggtcttaaatgttctcacaatctcactattgcccctgcgccggcactaactgagactcaaactcctcgttgtcgtatttgtcggaatagtaaatttgtttgtgggacatgaccgctccatctgcgagccttcagccccaagctgccaacctccaagcaactcccagcagcaggcaggtataaagttttagttatgcaggatgaacaagttctggagacctaatgtacagcatggtgactataggtagtaacactgtattatatacttgaaatatggtaaaagaaggctgggagcagtggctcacgactgtaatcccagtactttgggaggccaaggcaagcagatcacctgaagtcaggagttcaagaccagcctgaccaacatggggaaaccccgtctctactaaaaatacaaaattagcctgtaatcccagctactcaggaggctgaggcaggataattgcttgaacccaggaggcagaggttgcagtgagccgagattgcaccactgcactccagcctgggcaacaagagttgctccatctcaaagaaaaaagaaagaaagaaagaaacatgctaaaaagagtttatcttaaatgttctcacaacataaaaaaaggtaatcatgtgaggtgatgatgggtatgttaattagcttgattgtggtaatcatttcacaagatgtacatatatcaaagcagtgtattgtacatgttgtatatgtatatggtgggattgctggatcatatggtagttctacttttatataaatacatgcaatatttatttttcgagtataactcaatacagtggggggtgggggggaagtagtctattaccttgttaattcattcattcattcatgtaacaaatatgtcttgtacacttactatgtgccaggtactggaacaggctgaagagaggaagtgtcaggaaggaaatccgtataggagagcatctgggatggaagagtgaccctcatgtcctggtctacccagggctttcttagttttactaaagtccctcatcgaaggaactgcctcaggctcaagcaaactgggatatcctactggtcatcctactgcgatctgtgtcctcctgacctggcatttgtccctgcggctctgggactgtgatcagtttaggtccctgggcacagctctgagctgcaggagtgaggagcttttgggagcacctccaaggtggagaagaagaggctggtacctggattagaagtcgggcctggataatggcaggaagatcaagagaatgggttcagttctaccctggctacctgggggtcttctctttgagctttttttttttttttttttttcctgagacaaggtctcactctgttgcccaggctggagtgcagtggtgcgatctcagctcacagcagcctctgcctccagggttcaagcgattctcgtgcctcagcctcccgagtagctgaggctacaggcgtgtgtcaccatgcctgactaatttttgtattttttggtagagacagggtttcaccctgtaggccaggctggtctcgaactcctgacctcaggtgatccacctacctcggcctcccaaagtgctgggattacaggcgtgagccaccgcacccagcccttcctctttgagcttctgttctctcatctataaaacggggatggtcatctggaccactgaatctacaatcagcatgagtgcatgcttggataatctgctatgtctggccttctggcccttgaggctccagagaggtaggaagagtctccttcacttgctcaatccaccctgggagaaccaagtgaccagacgaatccactgagcataaagaatgcccaggccggccgggcaccatggctcaggcctgtactcccagcattttgggaggctgaggcaggccgatcacttgaggccaggagttcaagaccagcctggccaacatgttgaaaccccatctttactaaaaacacaaaaattacctgggtgtggtggcacacgcctgtaatcccagctactagggaggctgaggcagcagaatcacttgaacccgggaggcggaggctgcagtgagccgagatcacgccactacacttcagcctgggcgacagagtaagacaccgtctcacaacacacacacacatacacacacacacacacacagagagagagagagagagagagagagagagagagagagagagagagagagagagtacacccagccaggcctgcccctcttggacccattgtcttcctttgctacccagcaactgggaagaaaggtaactctctctccaggattggaggaaacagtaagcaaacctttctgctttttggtgaaccaaaagtggtgaaagataaactgtaactctggcaagggcaggttagaccaggaacccacctcacagttccacccatgcccactacacacacccactcccaccaatgcccccttcccttcataatccaactcccttaacttcatatccccctggccaggcctgggctgggacaatgaccactgttcagggacccaggaaggggctcagcagcgcacaatgagatctgcctatgttctgtgtcttcacagcccttctcctgggacgggcagtacagaactcatttcctcggcggtgtggggggactcacgtacccagaaactgccaggagaggagaaatcctcaaccttcagtctcttcccaggcaaaggataaaaaccagcatttaggaatcatccagaaactggagttggaatcctggccgtgtgactttaaacaaaaggcttaagctctctgagcctgttttctcttctgcaaaatgggggataacggtgcccctgtgttcacccgtcaggcaggttcaacggagacaacacatgtaaagtgcaggaacatattacatagaaggtggatcctataaaatgatggtgggccgggcgcagtgcctcacgcctgtaatcccagtactttgagaggctgaggcgggtggatcacctgaggtcaggagttcaaaaccagcctgaccaacatggtgaaacccccatctctactaaaaatagaaaaaaaaaattagctgggcatggtggcaggcacctgtaatctctgcaactcaggaggctgagacaggagaattgcttgaactggggaggcagaggttgcagtgagccaagattgcgccactgtactccagactgggcgacagagtgggactctgtctcaaataaataaataaaataaaatgatggtcacagaggtcctttgggctcttggagtttctcagccacagggtggagggagaggcaactgggagatggatttctccagctctggaattcttctaaaaattgctctttggggagatggaaattcagagaggttagatgtctggctcaaggactcacagcttgccagcagtgggctcagatttacggccagggattaagagagtcttctccagtgttttatgtcaaaaatcccgcatggtgtctggactgactccaggggaatcccttgggaagggactgatgtggccagaggggtgatggggatggggaggggtgtcagcccaaagcccagtcctccctgaaacaggagcagggtctgcccaatgcaaacagcccccggcatcagaccctgagtgaaccttggggacaaatgcagtaaacagcctctgttggtggtgacctgctttgagtacaggtcagggggacacgccccactggaggtggtggggttgtcctatacaaacccgcccaccattcaggccattgtgtggaggcctcacaatggtgtccaaccacaaagctctccctccgtccccgactgcccggcctcggtgactcagggctgggggactggggtgccttcctcacctgcttctcaggctagatccggggcccgagtagggaagggcatgggggcaggtgaatcacagtctgtctgcatccagggcaccccccctccccggatggaggaggtggatgggcctcccccaaccccaaccccttgaggcccctcgtggcctccgtttccaggccaagctgtgagaaacagtccttcctcctcctctgagtaaatgaacagacatctgagcacccagctcattatagatctcctcttctgcaagcctcagttcatcttgcacacgagggctgtttggtgaaaaagccccaacttcctgccctcggaggcaaccggagtaaaataagttctgggtgggtttgggcagtcctgggttcaggtatgaacaatcttgaaacttccctgtagggaagagaggctggctcccttaagcccgcaacaacacacagaaacaccaagctggatgccagcccttccctgagcccagggtcttttctctgggcagtaatgtccaggctaatctcctaaaatgaccaacagttcttgaaagacccctttggacccaggaacatgcctcccacagccctcccacgctgcgtttctgcttccagtccttccctcggtatctccccatcacgcagcccagatacatgcagctcacaggaaaggacccagatacgcctgatggctccctgcctcctagtccatgcctactccgtccccgctgccgggaacgcccttctcttttgctcctaagtgtgcctgtaaaattccaaccctgtgcaattcagatgccaccctgcagtttaagacccctgcccccaccgccaccacccttaccccatcaatgcctcttagcaaagttcctgctcagccctgtaccccgactgactggacgccccagtctctctcgcccaccagatcggagctcctggaaccctgcggcggcgacttgctcatttctgtccctgagagctgggcacagatactgggactggaggtgccgctaaaaccccctcagggagtgagtgtgtgagtgagtcggtgatggaaggaatccttgggtgtttccacactcatctcggcagatactcaattcacaatacagcggttttgtgaactcgcccacgtcagtctggtaaatgcagattcattgggtcgggctggaggaggcatttacagaaaagcaaaagcaaaagcaaaagacctcctggctgtccctgctggggcttaggaagcacaaatcacctgtcataccagcctctctcctatatgaatccgtccagctcctcagtgagccccagcccagtcccacttacctggccagcaggtgaggaggaggctcacggccagcgctagcaggggcctgcgtcggtgccctgggtgtgcagggccctcccggcccatcctactgcctgcccaggctgtgctcctcaccccccgagagagtccctgagactgaacccagcccagtctggccccggctgcagggagggtggtgaggacacaccttgctgagcttctcaagaggggcagggcttgccctagagggaagcagtgggtgccttcctggcaaaggtcagctggcatgattcagtgcactcagtgactgacacctgcaggctgataccttccgagagcagcggcccgagggagcccccaccgcggacagagcctgactccagagtctgttgccaaactgggggtccctctgggcttgaaggaaaacagggacccaggcatagacctgtcccgttctccaaagtccccaggttctacctgaccccctcctgcgcagggactggcaccgccagactggagctgggtggaccctccttgggggaggcacagctgcctctggagggttttggaatgttcaggagtgtacgcgaggctgcattcccacataggaactccctggctgccaggggagctgagggccggccttctcgtacccttccaaagccccacagagccacacccgctatactcctgccgcgctctgagtcctacaaaaccacctcggggctgcagtccctcactccccggtcaagctcttcagctgcccttgacagcagcagagaggcaaggaaggggctggtgtggggtacagggaggggattgggggttcttcctcctcctcaccagccctgcaatctccaccagcttcttctcaccccaggcctgggtgatgacaatagtcatttcagaagtaggctcttccccctcaaatcggcccagcacagattgcagggtgatgttttttaagtaccatgcccctcaagacacccccctgctgtccccctttgtccaggcactcaagagaccccccacccctctagcctctaacagtcagaggaagtgggtttatcatcacccatatcacccatctttttttttttttttttttgagatagagtctcgctctgtcacccaggctggagtgcaatgacgtgatctcggctcactgcaaccgccacctcccgggttcaagagattctcctgcctcagtctcccgagtagctgggattataggtgtgcgccaccacgcccagctaatttttgtgtttttagtagagatgggtttttgccatgttggccagtctggtttcgaactcctaaccttaagatccacccacctcggcctcccaaagctctgggattacaggcatgagccaccgtgcccggcctgtcatcacccatcttcaagataaggagacacctgcaggtgcccagtgtgaaggaggcaggcagtggatttggacctcagcgtgccagacacccccacagggccaaccacttctcctgggtcttgtacctggagccaaactccatggccctgtggctgggctcatggcccagggaagtctgtcagcaacccctgggggcttatgctctgttcaatttcctattaaccgtttctcttctctccttgctctgtagcccttcctctcagcatagacataccttgagccccaggaaacaccctgggcaggcaatctggccaaaacagataaatgaacaagtacaggtgatcaagctggaaatgagaggtaggtgggagatgccaaacccagactgggagggggcagggaatcagggaagtcttcctggaggaggtggcacgtgcatcaagatggaaagataggctggagtcctccagaccaggggagatggagagaagggaagggaagggagtttcccaaggaggagacagtggctggaagcaacagaaaggaaagctggaaggggaaagttgagcctaagttttgtccaaactcccaccctagttctctctcaaggtacccgtccctcacttaagaaaaatcatcgcagagaaacagaaggcaagccagtgagttttctgggcaatcactgtattcaatttcgcctacctcagagatgggaaaactgggcccctaaaaagagtatcacctgtaatcccagcactttgtgaggcagaggcgggtggattacctgaggtcaggagttcgagaccagcctggtcaacatgatgaaaccccgtctccactaaaaatacaaaattagctgggcatggtggtgcacgcctgcgatcccagctacttgggaggctgaggcaggagaattgcttgaacccaggaggtggaggttgcagtgagcggagatcgtgccattgcactccagcctgggagacaatagcaaaactccatttcaaaaaaaaaaaaaaaaaacacagagcaccagaatctgcaagatcagcgacagaactggaaacaggccccaggactctggagtccacaaccagtgctcttcccgagtaagcagtgcaaatcctctttctctagcacacagcagcaagtatccctaagcaccatagtacatcatgccttaggtccaggggtcgcccattcttataaggagtgcatctgggaaaatgggtttagattccagataggtcattagagctcctggtttttgttttgttttgttttgtttgttttggtttttgtttcattttgttttgttttttggggatggagtctcgctctgtcacccaggctaaagtgcaatggcatgatctcggctcactgcaacctccacctcccgggttcaagcgattctcctgcctcagcctcccaagtagctaggattacaggcatgcatcaccatgcctggctaattttgtatttttttttttagtagagacaggctttcaccatgttggccaggctggtcttgaactcctgacctcaagtgatccacccacctcggcctcccaaagtgctgggattaccagcatgagccactgtgcctggccctgttatcctaaatgaataacccagggacagaaaatcacgttctcacttataagtgtgaggtaaacaacggatatgtatggatgtgaagatgggaacaagagacactggagggtactacaggtgggaggcaggaggcggggctagggctgaaaacccacctattgagtactatgcatagtatctgggagacaggtgcattcgtaccccaaacctcagcgtcatagaatatacccatgtaacaaacctgaacataatttgtacctcctgaatctaaaataaaagtggaaattataaataaataaataaataaatgtttttaaagtatgttttaaaaaattaggccgggtgcaatggctcacgcctataatcacagcactttgggaggccaaggcaagtggattgcttgaggccaggagctcgagaccagcctggccatcagggtgaaacctcatctctactaaaaatgcaaaaaaattagccaggcatggtggtgcacgcctgtaatcccagctactcaggaggctgaggcagaagaatcacttgaacctaggagggggaggttgcagtgagcgagatccagcctgggcaacagagtaagactctctctcaaaaaaaataaaataaaatagcctctgactgttggtggtaatgtaaattagttcagcccctatggaaaacagtatgaagatttcccaaagaatgaaacatagaactaccattcaacccagcaatcccactactgctcaaagggaaaaaaatctgcccaaaggaaaagaaattgtcttatctaaaatacacttgcacctgtatgtttattgcagtactatacacaaaagcaaagttgtggaataagtgtccatcagtggatgaatgaataaagtaaatgtggtaagtatacgccatggaatactatacacccataaaaaagaatgaaatcatgtcctttgcagcaacatggtggagatggaggtcattatcctaagtgaaataactcagaaacaggatgtaaaataccatgtgttctcacttaaaagtgggagctaaacaatgagtatacatggacacaaagatggaaataataggcactgggaactccaaaaaaagggagggtaggaggaagagtgagggttgaaaaattacctattggccgggtgcggtggctcatgcctgtaatcccagtactttgggaggccaaggcaggtggatcacctgaagtcaggagttcgataccagcctggccaacatggtgaaaccccatctctactaaaactactaaaattagccaggcatggtggcgcattcctgtagtcgcagaactcgggagactgacgcaggagaatcgcttgaacccgggagacggaggttgcagtgagccgagatcacaccattgcactccagcctgggcaacaagagcaaaactctgtctcaaaaaaatttttttaaaaattaaaaaaaaacttggatgatgaaataatttgtacaacacacccccgtgacatgagttcacctttgtaacaaaccttcccatgtacccttgaacctaaaagttttttaaaaaaggaactgggggagaagtgtacagatttctgggtgctctcttctcaaaggtctgcctgccccttgtgggaaaatggagaggaccacagcagaatcaaagacgaagcaaggcaacctctgtctcctgctatccccagactgacccggcctgagccagctttgcttatgtgataacatcgctaggggcaaagaagagacgtcagggctgggtggtgctggccgagtgagacagagggctgagggacgctgctgagtagagaaaagggagagagataagtggcggagacagaggaggcagggtcagagagcaggaggagaaacccacagttatcactaaacagcaaggtgcagtggggtttgtttgtctgagcttttttttttttctttttttgagacggagccttgctctgtcacccaggctggagtgcagtggtgtcatctcggctcactgcaacctctgcctcctgggttcaagcgattctcctgcctcagcctcccgagtagctggggttacaggcacctgccaccatgtccggctcacttttgtatttttggtagagacggggtttccccatgttggccaggctggtctcgaactcccgtcctcaagtgatccacctgcctcagcctcccaaagtgttgggattacaggcgtgagccaccgcacccggccagggagtggatttcaatggcacgggagagtctcccagggcaaacatcatggaaaaggtggaactagaggaaactcagaaaagctgttggcatttcttaataagatgggggtttccacgtaggagaacagaccagcctggattgtcaggcttagaagtcacaggggacactgggcatggtggcttatgcctgtaatcccagcaccttgggaagccgagcctagaggattgcttgagcccaagagtttgagaccagcctgggcaacataatgagactccatatctacaaaaaataaaatacaaaaattagccaggcatggtggtgctcacctgtagtctcagctactcaggagcctgaggtggcaggatggcctgagcctgggaggtggagactgcagtgagccaagatcacacctctgcactccatccagcctgggtgacagagtgagaccttgtctcaaaaaaaaaaaaaaaaaaaaaaaaagccaggcatggtggctcatgcctgtaatcccagcactttgggaggccgagatgggaggattgcttgaggcaaggagttcgagaccagtctgggcaatatagtgagaccccatctctctaaaaaaaaaaaaaaaaaaatcacaagggaatgacaggggagctggaggtagtctaggttcaaatccccacagtagaagaaatgaacatgaccctaaaagtgtttaccgagaacttagtgtttcccaggcatccatccgcgaaaccagaagaaaggacactgacattaaatcacagcatccacaaatgacgtgagttcaatattttctctgagccacgcccttcccagaagtgaatggctcttcattctcgaggtttctctgtgaagtggtgcgtttcattgacccattttacagtggtggaaactgaggcacaaagaaattacataactcacacaagattgcacagctgggccctgtatgtttccatttgcaatgtgttcaaggacaggcaagaggaattgaggggaaagaagccaaaagagtgttctgaggtggagcgtgatgtctcatgcctgtaatcccagcactttggaaggctaaggcgggcagatcacgaggtcaggagttcgacaccagcctggccaacatagtgaaaccccatccctactaaaaatacaaaaaaaaaaaaaattagctgggcatgatggcgtgcacctgtaatcccagctactcaggaggctgaggcaggagaattgctcgaacccgggaggcggaggctgcagtgagccaagattgcaccattgcactccagcctgggaaacagtgcaagactccacctcaaaaaaaaaaaaaaaaaaaaaaaagggtgttctgaggatgggggcactgtctgtctggaaaaggggtttgaaggagctttctacagcagtggttttcttttcttttttttttttgcgacggagtctcactctgtcgctcaggctggaggcagtggcgtgatcgcagctcactgcaagctctgcctcccgggttcaagtgattctcctgcctcagcctccccagtagctgggactactggcgcctgccaccacacctggctaattttttgtatttttagtagagacagggtttcaccgtgttagccaggatggtcttgatgtcctgacctcgtgatctgcccgcctcggcctcccaaagtcctgggattacaggcgtaagccaccgcacccggccagcagtggttttcaagtgagggcaattgtgcctcccagctgccatttggcaacgtctaaagatgttgttttaactgagagagaaggggtgctactggtgtctaataggtggaggccagagatgctgctaaacatcctacaacacacaggacagccccttacaacaaagtattacccagcttctaatgtcaaaagcgccaaggctgagaaatcctgttctagaaaaaatgggccgcaggtggcttatgtctgtaatcccaggactttgggaggctgaggcaagaggatcacttgagctcaggagttcgagaccagcctgggcaacatagtgagatggccccactaaaaataataaaaaaaaaaattagccaggagtggtggtgcacatctgtcgtgccagctaccctggaggctgagacatgaggactgcttgagcccaggaggttgaggctgaagtaagccatgactgcctcgctgtactccagcctgggtgctagtatgagactccgtttcaaaaaataaaattaaaattaaaaaaaataatagaggaagggaacattttacatcgtggtgtgcaatggttacacatatgtaaaaattcattgacacgcacttaagattcaggcattttgtgcacactttacttgtgtctgttacattgcaacaaaaagttgttttttttttttttttgagacgaagtcttgctctgtcacccaggctggagtgcagtgggccaatctcggctcactgcaacctctgcctcccaggtttaagtgattctcctgtctcaacctcctgagtagctgggattacaagcgtgcgccactatgcctggctagtgtgtgtgtgtgtgtgtgtgtgtgtgtgtgtgtgtgtgtgtttagtagagatggggtttcaccacgttggccaggctggtcttgaactcctgaccttaagtgatccacccgactcagcctcccagagtgctgggattacaggcgtgagccacagtgctcgaccccttctaagtaatgactcggcccactgcctcacctctgttcatgccctcatcctctctctctgcctgccttcccgaaatagcttctttactcatattcatcttctaccaccagctccaccctcctccagttcccctccgcccgcccagccaacagagtgacctttcaaaaatgcaacaccggccatgccccgccccggtccgaattcttcagtgccttctcaccgccctcgggaccaagtccaaacgctgcagcctggcgttgaaggcccaccttgagccgggacccggcctgcattggactaacgtatgacttcgcttctcaccccgaagcctttgcctcggccgttccctgtgccggaattaccctccttccctttacctgattctgtgtcccctaattctctccaggcctcccctacctccctccccagacagaaagcagagctccccgccctgttcccaaagcaccttgtaacttccttgtaaaatcgtttgaccacaggatcgcgtatctgtgttttcatctcttataactctctctagtgtgtgaatatgaagagggtacctgactatgataggtgtgtcacacagacaaaaaaaaaaaagtttgttgaatgatttattcatatattgaccattcaccagggaccaagcgctggggataaagagaaggaacaaggccgggcgcagtggctcacgcctgtaatcccaacactttggacggccaaggggagcagatcacctgaggtcagcagatcgagaccagcctggccagcatggtgaaaccccgtctctactaaagacacaaaaaattagccgggcgtggtggcgcatgcctgtaatcccagctacttgggaggctgaggcaggagaatcacttgaacctggaaggcagaggttgcagtgagccgagatcggcccactgcactccagactgggtgacagagcaaggatctcaaaaaaaaaaaaaagagaagagaagaacaaggccgggtgtggcggctcatgcttgtaatcccaaccctttgggaggttgagactggaggattgcttgagcctgggaggagttcaagaccagcgtgggcaacatagtgagaccccgtttctacaaaaaaaaattttttttttaattaggtgggccgggcatagcagcatggagcccggccgccgcagcacctctgctccgcgatccgtgggcatcctcttcactgtgtccattggatgtttgcctcccagactgagggggagctcagaatgacccaaattctcaaaacaagtttcctcaccgggcgcggtggctcacgcctgtaattccagcactttgggaggcgaagtcgggtgaatcacgaggtcaggagttcaagaccagcctggccaacatggtgaaaccccgtctttactaaaaatacaaaaattagccaggcatggtggcgggcacctgtaatcccagctactcgggagggtgagacagaatcgcttgagcttgggaggcagaggttgcagtgagccgagatggtgccactgcactccagcctgggtgacagagtgagacaacgtcaaaaaaaaaaaaaaaaaggaaaaaaagaaaaaagaaaagtttcctcgagctacagctatcaaagtcactgacatttcaagaggttgtggggtcatgtatgaaattaaaattgaatcagaagaagttaaggaggagagaactattcagcagcaccaaatagtgaatcagtcactacaagaagaaatcaaagtgatgcatggattgcggatatttacctctgtccccaaacgctcagcacaccctggctgcatagatgctgctgcttaagaccttggatgaacttgactgacaccattcttccctaggcatttaccaaaaaatttgtatattttgctcgtatacatttccatattataattatagaagatgtgtaatctatttagatgttaattaaaggaaacaacgaaaaaaaaattagccaggttttgtggtgtgtgcctgtagtcccagctactcggaaggctgaggtgggaggattgcttgagtccaggaaatgaaggttgcagtgatccgagatcgcaccactgcacgccagcctgggcaacagagcaagaccttgtctcaaaggaaaaaaagagaaaaggagagagagagagaggagaacaagattcaggaggctgatgctagaggatctctttgaggccaggagttcaagaccagactgggtagcatcgtgagaccccatctctaaacaaataaaaaacttagccaggtgtggtggcaccagcctgaagtcctagctatttgggaggctgagacaggagaattatttgagcccaggagttcaagaccagcctgggcaacatagtgagatcctgtctctacaaaataaaaaaataaaaaatttagacaggcacagtgttacctgtagtcccagctacttgagaggctgagaaaggaggatcgcttgtgcccaggagttggaagctgcagtgagctatgatcacaccactgcactccagcctgggtgacagggcgagaccccatctcttaaaacaaaacaaacaaaaaaagagagatgaacaaagcagatgccttgtattttctgtacccctttgttttgttttcatttttgttttgagatggagtctcgctccgtcacccaggctggagtgcagtggtgcgattgcagctcactgcaacctccagctcctgggttcaagctattctcctgcctcagcctcactccacttcccaggtatgacaaccagaatgtctccagatattgccaactgtcccctgggggcaaaatctctcctaattgagaaccactgattgatgtcaataccaaagagtctttttttttttttttttttgagacagggtctcactctgccctccaagctacagtgcagtggcatgatctcggctcactgcaacctccgcctcccgggttcaagcaattctcctgcctcagcctcctgagtagctgggattacaggcacccgccaccatgcccaggtaattttttgtgtgtttagtagagacagggtttcaccatgttggccaggctggtctcaaactcctgacctcaggtggtctgccctcttcggcctcccaaagtgctgggattacaagcatgagccgctgtgcccggccaaaagagtctagactaaagaaaagtccggttatcaagaagagacatgacttcaagtatagtccggtggctaaaagctatggctctcagaacagtttattgagcacttaagatgtgtggattttcgtgagtataaattatacctccatataaagggaaaaatagaggaggatagtattctatatctttctgtggtgatgctgatgttctatatcttagtagggatttgggttagacagatgtttgcatttgtccaaacttagccaacgtacacttgaggtctgtgcatttaattgagtataaacttgacctcaaaagataaaattctatacgtgaatactgacctctagttaatgctctgcgtgaagaactttttgtttacttttatatttatttatttatttacttttagagacaaggtcttgctatgttgcccagtctgtggcgtgcagtggcacaatcatagttcactgcacccttgacctcctgggctcaagcaatcctcccatctcagcctcctaagtagctgggactacaagcatgcactaccacgcccagctaattttttacttttttgtagaaataaggtctcgctccattgcccagcctaatctggaactactctcctcctgcttcaccgccgccgcctcttcctcctcctccttctccttcttctccttcttcttctccttctcctcttccttcttttctttcttctttctttctctttctttcttctttctttctttctgtctctctctttctttttctttctttctttctctctttctctttctgaaacctcttcctcttcttccttcttccttccttcctcgtcctcctccttcttctttcttcttttgtgagacagggtctcactctgtcacccgggctctgagtgcagtgacacaatcatagttcactgcatccttgacctcctgggctcaagtgatcctcccaccttgacccccacccaaagtgctgggattacaggcatgagccactgcacctggcctgcaaaattatttctatgtttgaattttttatgataagattttgggggaaatcccttgcatttttgcatgttactgcatacaaattctaatttcaccttcaaaagggggaaaataagagtatacatggctttgaagtcagattcacctgagttcaaatccccaaagggcttcacttctcacatggctatgcccttccttcttctgacctgctttctgtcccatcaacctgggctaatgatttattgaggtggggttttaagcacaagctagggaaccagacacactgggtttaaatcaaagaccattattctaagtgaattaatgcaaaacagaagaccaaataccacgtgttttcacctctaaggagctaaacactgagtacacacagacataaagatgggaatgataggccgggcgcagtggctcacacctgtaatcccagcactttgggaggccaaggccagtggatcacaaagtcaggagtttgagaccagcctggccaacatggtgaaacaccgtctctactaaaaatacaaaacttagctggttgtggtggcgggtgcctgtaatcccagctactcaggaggctgaggcaggagaattgcttgaactcgggaggtggagcttgcagtgagccgagatcgcacactgcactccagcctgggcgacagaggagactccgtctcaaaaaaaaaaaagaaaagaaagaaaaaaaaatgacaactccaccagttcccaggtgtgccgtcttgggcagtgacttcagtgttttgtgcatttgaaatgggtaatgacagcacctactttgcagcattgctgtgaggctgaaatgaggactcccggtgcccttccagcaaagctggtgaagtggcatcaagcatgtttatctgtgagagggtgcgagacacctgcagtcaccctgggggagactttgagagacttcagaaaagcaggagtggggcagggccaaggaaatattttcttgcaattatttgcaattactaaatctgtttgcttttatcctccccaggcaatggaacctgaaaaacagaggtttcaaaggcacatctgggctggcacggtggctcatgcctgtaatcccagcactttggagagccgaggtgggaggatcagtagaacccagaagtttgagaccagcctgggcaacatagcaagacccccatctctacagaaagttaaaaaattagccgggcggccgggtgcggtggctcacacctgtaatttcagcactttgggaggccaaggtggatggatcacaaggtcaggagttcgagaccagcctggccaacatggcaaaaccctgtctctactaaaaatacaaaaattagctgagtgtggtggtatgcacctgtaaacccagcttctcgggaggctgaggcaggagaatcacttgaacccaggaggtggaagttgcagtgagccaagatcatgccactgcattccagcctgggcgacagagtgagactctgtctcaaagaaaaaaaaaaaattagccaagcatgttggtgcacacctgtactatcagctactcatgaggctgaggtgggaagattgtttgagcctaagagttcaaggctgcagtgagccattaccatgcctcacttcagcccgggtgacggggcaagatcttgtccaaaaataatttttctttttaaaaagcacacctgctctttcctgattgtaaatcttaaaagcaggattaagatgcccgccaggacttgctgtggggtctccagccctcagctcaatcccctattatacttattaagtccatctctccatatttactgaattatgtaaagggtagaggcaaagataattatggtctcaagtatgggtgactctgaagccagaagccccatggtttgaattgtgtccccctgaaaaatagacgttgatgtcctaatgcccagtacctctcagaatgtgaccttatttagaaatattggaaacgaggctaccagggtgggctctaatccaataggactggtgtccccttaaaaaggggaaatttgaggccgggtgtggtggctcccgcctgtaatcccagcactttaggaggccgaggtgggtggatcacgaggtcaggagttagagaccagcctggccaacatggtgaaaccccatatctactaaaaatacaaaaattagccaggcgtggtggtacgtgcctatagtcccagctacttggggagggggctgaggcaggagaatcgcttgaacccgggaggcggaggttgcagtgagccaagaccatgccattgcactccagcctgggtgacagagtgagactccatctcaaaaaaaaaaaaaggttggggaggaaatttgggcaccaagacagacatacacagagataagcccatatgaagatgacggcaaagattggagtgaggtatccacaagccaaggaaacttgaagattgtcagcaaataaggccgggcgtggtggatcacacctgtaatctcagcattttgggaggccgaggtgggaggatggctcgaggccaggaggccagcctggctgacatggcaataccccatctctactaaaaatacaaaaattagctgggcatcgtggtgggcacctgcaattccacctactgaggaggctgaggcaggagaatcattgaacctgggaggcagaggttgcagtgagccaagatcgctccactgcactccagctgggcaacagagtgagattctgtctcaaaaaaaaaataaagttagcaaacaaccagacgctgggagagagacataggacagatccttccctccacagccccagaaggaaccaaccctgtccacaccttgatcccggacttctggcttccagaacagtgagacactaaatttctgttgttgaagtcacctagtctgtggtactttgtcactgcagccctaggaaattaaaacacgctgtaaatagcagtaaaggagctggtagtggggcgggagaagagggggcaatgactcagttcacactgtcagatttttgccaggggctgacaggtaccagggaaagtgtcaggtatgaggacgtgacagtgactgagggttacagcccctgcccccagggggctcagagtgacattgccgaggtgggtgatgaataagaaataggtccatgccccttaggtgacaacagtgggttggacccacaaggagggagttgactctaatctggggctccatgcaacctgaggttggatgcctaaaagatgggtagtgttggccaggtggagtggctcatgcctgtaatctcagcactttgggaggccaaggagaggacatcacttgagctcaggagtttgagaccagcctggccaacacggtgaaactccgtctctactaaaaatacaaaaattagccaggcgtggtggcgcgtgcctgtaatcccagctactcagaaggctgaggcaggagaatcacttgagcccaggaggtgaagcttgcagtgagctgaggtctcgccactgcactcctgcctgggcaacagagcaagactctgtctcacaaaattaaaaaaataggccgggcctggtggctcacgcctgtaatcccaacactttgggaggctgaggcgggcagatcacttgaggtcaggagtttgagaccagcctgaccaacatggagaaagcctgtctctactaaaaatacaaaattagccaggcatggtggtgcatgcctgtaatcccagctactctggagtctgaggcaggaaaatcgcttgagccccgggaggcggaggttgcagtgagctgagatcatgccattgcactccagcctgggcaacaagagcgaaactccgtctcaaaaaaaataaatacataaaaataagaaataaagaaataaattacccagtctcaggtatttctttacagcaatgcgagaatggcctaatatgccttgcctccagtgtgggctgaacctaatgactccgttctaaggaacagaaaccggcaaaagcaatggtgtgtcacttttgtgattaggttacaaaagactgcgatttccatctcactgcactccatctagctccttcttggcttgcatgctttgaaaaaacaagtggcctcctgggagaaagccgcgtggcaatgacactgagggttttgtttggttttgttttgttttgttttgttttgtttgagacagagtctcgctctgtcgcccaggctggagtgcagtggtgcgatctccgctcactgcaacctccacctcccaggttcaagtgattcttctgccccagctcccgaacagctgagaccacaggcacgtgccaccacatccggctaattttttctttttgtttgtatgtttgtttgtttttgagacggagttttgctcttgttgcccagactggagtgcaatggcttgatctcagctcactgcaacctccccgtcctgggttcaagccattctcctgcctcagcctcccgagtagctgggattacaggcatgcaccaccacgctcagtaattttgtatttctagtagaggtggggtttctccatgttggtcaggctggtctcaaactcccaacctcaggtgatccacccgcctcgcctcccaaagtgctgggattacaggcctgagccatcacacccggctgacactgagggccttaatctaatagccactgggactaaatcctgccaacagggagcttagatgtcagtcctcccctagctgatccttacagtgaggacagccttggatgacatctggataccagcctaggagagaccttgaggcagaaaacccagcccagagtccaggcccactggaactgtagataataaatgttgttttgagcccattcattttggagtaatttgttacacgatgatagctgatacaaatgccacacaccaactgactcatgtccacttcattgacttccctgtttttgtggaggatggaggccttcacttttccaaataaattttttttatttttacttattattattattattttgagatggagtctcgcactgtcacccgggctagaacgcacgggcgcaatctcggctcactgcaacctccgcctcctaggttcaagtgattctcttgcctcagcctcctgagtagctgggattacaggtgtgtgccaacacacctggctaatttttgtatttttagtagagatggggtttcaccacgttggccaggctggtctcgaactccttacctcatgatccacccacctcagcctctcaaagtgctgcgattacaggcgtgagtcaccgcgcccggccttcttttttttttcaattgttttttcttttatagaggtgaggtcttgctgtgttggccaggctggtcttgaactcttggcctcaagcaatcctcccacctcggcctcccaaagtgtaggattacaggcgtgcaccactgcgcccgaactccaaatgaatttttgttgcttatgtgaagtcacttcaaagaggctcttattgacctctgcagaatcaaagaagttggacttttctgtttggatttcataatagtaagtgaacctgccactgggcattccttttgtttttgttttttgagacagggtctccctctgtcacccaggctggagtgcagtggtgttatcatagctctatgcaacctcgacctcccaggcttaagccatcctcccacctcagcctcatgagtagctgggactacaggtgcaccccaccatgcctggctaatttttgtattttttgaagagatggagttttgccatgttggctaggctggtctccaactcctgggctgaagcaaatcctcctgcctcgccctcctgaagtgctgggattatgggtgtgagccaccacactccacctggacttcttaactaatatctagaagagagctgttacttcggaaaaaaccctcaagcttttttttttttttttttttttgaggcagagtctcgctctgtcacctaggctgaagtgcagtggtgcgatcttggctcactgcaacctccgcctcccaggttcaagcgattctcctgcctcagcctcctgaatagctgggactacaggcgcacaccaccacacccggctaatttttgtatttttagtagagacggagtttcaccatgttggccaggctggtctcgaacgcctgacctcaggtgatctgcctgcctaggcctcccaaagtgctgggattacaggcatgagccagtgcgcctggcaaaaatccacaaactatttcaaggagaggggaaaccaagatgttctgagtgggtagaggaagaaggtgaggatggagctgagctggaccctggatgagggcatttcaggaaaatctgagccccaaaaaatgaccccggtggacacactctccccagtgctgcagacactgcaataaccaaatatctagctagtcatgtgaaatcttcagagttaacaaaaattccctaagatgttgacaatttaattaaaacatttctaatctacttaaaaaaaaaggttaactgacacatattgtatatatttacagagtacaatgtgatattttgatccgtgaacacattgtagacagattaaatcaagctaatttttgtttttgtttttgtttgagaaggagctccgctctgtcacccaggctggagtgcagtgccacgatctcggctcactgcaacctccacctcccgggttcaagagattctcctcctttagcctcctgagtagctgggattacaggcatgcgctaccatgcctggctaatttttttgtacttttggtagagacgggattttgccatgttggcctgtctggtctcaaactcctgaccccagatgatccgcccaccttggcctcccaaagtgctgagattacaggcgtaagccatcgtgcccagccataaatcaagctaattaacatatctatcacatcacctacttagcactttttggggagacgagaatgtttaaaataggctctattaggctggacgaggtggctcatgcctgtaatcctagcgctttgtggggctgaggtgggtggatagcttgagcccaggagtttgagacaagctagggaaacacagtaaaaccccaactctacaaaaaatacaaaaattagcccagcatggtagctcacacctgtaatcccagcactttgggaggccaaggcgggtggatcacctgaggtcgggagttcaagaacagcctgaccaacatggagaaaccctgtctctactaaaaatacaaaattagccaggtgtggtggtgcatacctgttaattccagctactcaggaggctgaggcaggagaatcgcttgaacccaggaggcaaaggttgcggtgaccgagattgcgccattgcactccagcctgggcaataagaatgaaactcaaactcaaaaaaaaaaaaaatacaaaaattagccaggtctggtggcatgcacctgtagtcccagctactcaggaggctgaggcaggaggatcacctgaaccagggagggagaggtagcagtgagctatgatcacaccactgcacaccagcttgggggacagagtgagaccctgtctcaaaaaaaaaaaggctttgttagcaatatttaaatatacatgattgctaactatggccatcatcccatgcagtagatcattaaagtgtgttcctattgactattatttaaaagatacgccgggcacagtggctcacgcctgtaatcccagcactttgggaggctgaggcgggcggatcacgaggtcaggagatcaagaccatcctggctaacacggtgaaaccccacctctactaaaaatacaaaaaattagctgggcgtggtggcaggcgcctgtagtcccagctactccggaagctgaggcaggagaatggcgtgaacccgggaggcggaccttgcagtgagccgagatcgcaccactgcactccagccggggtgacagagagactccgtctcaaaaaaaaaaaaaagacaaaaaaatatttaataacagatgttgatgaaaatgctgagaaaagggaacgcttgtacactgctggtcagagtgtaaattagttcgacctctatggaaaacagtatgaacatttctcaaataggccgggcgcggtggctcacgcctgtaatcccagcactttgggaagccgaggcgggcagatcatgaggtcaggagattgagaccatcctggctaatacagtgaaaccctgtctctactaagaatacaaaaaattagccaggcatggtggtgggcacctgtagtcccagctactcgggaggctgaggcaggagaatggcgtgaacctgggaggcggagcttgcagtgagccgagatcgcgccactgcactcaagcctgggcgacagagtaagattctgtctcaaaaaaaaaaaaaaattctcaaataactaaacaatagaactatcatttgatccagcaatcctactactgggcatatactcaaaaaaaaaaaaaaaaaagaaatcaatatatcaaaaagactcctggctgggcatggtggctaagcatgtaatcccagcactttgagaggccaaggtggacagatcatttgaggtcaggagtttgagactagcctggccaacatggtgaaatcccatctctaatataaaatacaaaaattagccaggcgtggtggcaggtgcctgtaatcccagctactcagaagacagaggcacaagaattgcttgaacccgggagatggaggttgcagtgagctgagatcacgccatgcactccagcctgggtaatagagcaagactctgtctcaaaacagacaaacaaacaaacaaacaaacagatacctgcacttgtaggtttatcacagcactactcgcaatagcaaagataagaaatcagcctaaatgtccatccacagaggactggctaaagaaaatgtggtacatatacacagcgcaataccacacagccataaaaaaaaatctttgagccgtgaaatcatgtcttttgctgcaacagggatggaactggaggtcattatcttaagtgaaacaggtcagacacacagtcaaatattgcatgttcttactcatacatgggtgctaaaaaatgtgttcatgtggatgtagagagtggaatgacagagcagatgtggtagggtgatgagaaattacttaatggctatgatgtaccttattggggtgatggataccccaaaagccctgacttcaccactatacaatttatgcatgtaacaaaattacataccctctctagatttatttatgtatttacttattgagacagagtttcactctccttgcccaggctggagtgcaatggcatgatcttggctcactgcaacctccacctgtaatcctagcactttgggaggccaaggggagcagatcacctgaggttgggcgttcgggaccagcctgaccaacatggagaaactccatttctactaaaaatacaaaattagccaggcatggtcatgcatgcctgtaatcccagctacttgggaggctgaggcaggagaaacgcttcaacccggaaggcagaggttgcggtgagccaagatctcaccattgtactccagcctaggcaacaagagtgaaactctgtctcaaaaaaaaaaaaaaaaagagatggggtcttgctatgttgcccaggctggagtgcagtggctatccacaagcaatcatcacaaactacagcctctaacttctgagctcaagtgattctcccacctcagcttccaaagtagctaagactacaggcacatgccacgacctgcagctgcatagacttttttacaacctttatcttcttgattttctgccttggcaagggcagaagccctgaccacattgtttactgtacatcccatggtgtttgacacaggtgttaccacccagcaggtgctcaataaatatttgccaaacaagcgaaggaatgaatgaaggaagttagtgtccacaagacaggtctgcttcactctttgagttcggaaacaaagcagatgacaggagctggtggcacgtacactcccaaatgtccagtgccaacaccttgccctgctcttactggctggccaggtgggagctgactcgtacttcctccagctccccagcagaagctgtatggcacttcccagctgctgggaggaccccttctcattgcacagttggcctcatgacagcctcgccctactgctcttcatggtctcctgggcacacctgtggtgttagccagctcaggtaacatcatgaccagctgctaatctcaagtgttcacagaagcagctgagaaggacagcaaggaagcgttcccgtgaggccagactgggaaagcccagaaggctgaggtgcactgagctctcctgaaatatgtaaagagcacatttggctctaggaggtagtgacttagagggtcttcagcaaatgacttaaaagaggcatcctctacctgatgctttcagtgagccaggcattgtgttaagtgtttgctttgtgctatctctctgtctcctttttttagatggagtttcgctcttgttgcccaggctggagtacaatggtatgatcttggctcactgcaacctctgcctcctggggtcaagcgattctcctgcctcagcctcctgagtagctaggattacaggcgtgtgccaccacgccctgctaatttttgcatttttagtagagatggagtttctccgtgttggtcaggctggtctcgaactcctgacctcaggtgatccgcccacttcggcctcccaaagtgctgggattataggcatgagccaccgcgcccggcctcttttttttttttttttgaaacagggtcttgctctgtcacccaggctggagtggagtgtagtgacgcgatcttggctcactgcaacctctgcctcccaggctcaacccatcctcccaagtagctggaactacaggaaccctccaccaagcctggctaatttttttgtagagatggggttttaccattttgcccagggtggtcttgaactcctgggctcaggcaatctgccttggcctcccaaagcactgggattacaggtgtgagccaccatacctggccaatgtgctatatcattaaatgctcttagagccacattgaacagatgagctgctgagaaccaatgggttcagcaatgtgttcacaaccaagggttcaaatccagaactctgaagtcagagatgtacaagaataaccactggcctccctgtccctccctaccttacatgtgccttgctctgggacagaccctggaaacgctctaaagcagctcttatggtggaaatgcaacgcaagccatatatgtgttttaaaactttctagcagcccctccccacacacacacataaaaagaaacaaatgaaaatcacgttaataatatattcctggccaagtgtgatggtacacacctgtcatcccagctacttgggaagctgaggcaggagaatcacttgaacctgggaggcggaggttgcagtgagccgagatggcgccactgcactccagcctgggcaacacagagagactctgtctcaaaaaataaataaataaaataaaataaaaaataatatattccaggtcttggcaaactttcagtaagggcccagagtgagtatcttagttttcacaggccatgagaaccctgctctgtcttcctcttttgttgttgttgatttccccaatccttcaaacatgtaaaaaccatcctatttttttttttctaagacagagtctcactctgtcacccaggctggagtgcagtggcgtgatctcagctcactgcaatctctgcctcgcaggttcgagtgattctcctgtctcagcctcctgagtagctgggattacaagcgcccgccaccaagcccagctaattttttgtattttagtagagatggggtttcactatgttggccaggctggtctcaaactcctgacctcaagtgatccacctgcctcagcctcccaaagtgctgggattacaggcgtgagccactgcacccggccagtaaaaaccatccttagcttgagatctggacaaaaaagaactacaggctttgtccatgactggaaggactcaagaaacaaatagtaattcattttaaaaataattgaaggagggccaggtgtggcagctcacgcctgtaatcccagcactttgggaggctgaggtgggcagatcacctaaggtcaggagttcgagaccttcctggccaatatggtgaaacttcatctttactaaaaatacaaaaattagccgggcgtgttggcaggtgcctgtaatcttagctacttgggaggctgaggctggagaatcgctggaacctgggaggcggaggttgcagtgagcccagatcatgccactgtgctccagcctgggtggagcaagacagagcaagatctggtctcgaaaaataaataagtaaataaataaataaaataattgaaggaggagaagaagggggaggagaaaggggaagaagagaaaagaacgaggggaagaaaggaggcggagggtcagggagaaaaggagagggaagcaggaggagaagaaaaggaggaagaaagaaagaggaggttggggccgggtgcagtggctcacgcctgtaatcccagcactttcggaggccgatgcaggaagatcatgaggtcaagagatcaagaccatcctggccaatatggtgaaaccccgtctctactaaaaatacaatcattagctgggcatgatggtgcatgcctgtagtcccagctactcaggaggctgagacaggagaatcgcttgaacctggaaggcaggggttgcagtgaactgagatcctgccactgcactccagcctagcaacagagcaagactctgtctcaaaaaaaaccaaaaaaacaaaaagaggttggaaggagggagaagaaacatctactaaacccttacatcatgtggacgccatctttgctgggtaactcctcactgcagcttaaatttcactagcagagaaactcctgattccctcccctaggttcaccctacctgcctgaatgctacatacttcccccatcctccacatcatcctgttttattgtgatactttgtttcaaacttgtcttcactagttgactctaaactgcgtgaagctgcaaccaatttgcccatcctctggcatcaggcacagtttcaacgtctactagaccaataaagaatcaaagacatttaaacactggcagggccaatgtctagttagaagattaaaaaggcaaggacttactgtctccggtcctggtgtgggaatgtggctggtgcctcagccctgagtgtgcaggatgtgactgctcagtgggcacgggatacactgggatcctggggcctccagggtcccatccctggcctctggcgtccagcctccaggaagtcataggaccctctggcctcgcaggtgaccttgaaggaactgggctgaatgctgcccttctgatcagctttctcttgtttggctgcctcttggtgtccacagaagcatcattcatgttcctgactctggacagtgagcgtgtccccagggttctcccacaggagatgggcatatcagggcacaggtcttctgcagaaggctgagatgtgggtacatggtgaccacccaggatttctgtggctgcaaccaggcttagcagggctctggtgtccagatgagtaattcctcctggggagaggagagagaggagacaggatcagtgttacctcttcagtgatttagaaaactcagagccataagtatacttcagaagaggcaatcctctataagtgctccctgaataagaccccaaattgcaaacaaaccttgcaaacaaagagctagtctaggccgggcgcggtggctcacccctgtaatcccagcactttgggaggccgaggcgggtggatcacctgaggtcaggagctcgagaccagcctggccaacatggtgaaaccccccttctactaaaaatacaaaaattagctgggcatggtagtgggtacctgtaatctcagctactcaggaggttgaggcaagagaatgacttgaactcgggagaaggaagttgcagtgagctgagatcgtgccattgcattccagcctgggtgacaagagcaaaactccatcccaaacaaaaaaaagagctagtctagtgctaatctgtccaattctggaagctacaataataaaaattgaaaatagcagtcctactatttatggagtcaccagtgtatgccagcattgaccatgcttcctcccaatctttttgacaactcttgtcaatattggtaaagtttatagcagtatccctcaaggtttgattcacataggaatcatttgttaaaatgcagtttctgatacggaagatcctgcggagattcttcatgtctaacaagaccccaggtgaccattctgcttcacttcacagacctcgcagagagttcaagtggatgtatttgggcaaactgagcatttagtgactatttgctggatgaatgaatggatgggtggatgagtggacagacgatagatggatgtatgagcagatagatggattgatgagtggatggatgggtgggtgggtggatgggtggaggaatgaatgggtgaatagatggatgaatagaagatggatggattaatgaaagatggctgcatggatggaagaaggggttggtgggtgagtgcatgaatggatagatggatgagtggatgaatgcatggatgagtggatgaatgaatggatcggtgaatggatgaatgggtgggtgggtggatgcaggaatgagtgggtgaatagatgaatagaagatggatagatgaatgaaagatagtcatctttattaaatatcggatgaatgaaagaggcaagttcccccataagcctctgaaatgtggttattagaaaataattgtgtcctggaagccagctcagggccaggcacatcataggttcttagaaataaacaagcaccttggcacttgaaaaaaatgtccaaggcatgaaggttattctcacatttttctcttctctcctaaagcaagttgtaagactctcatgtgagagcagccctccctatcccgggaggagaggaacatcttatctctgaagacacaggacacagagaagaatctgaacaaacaggcctggctaagttcccccagtttactggcagaagatcctttctttttttttttttttttgtttaacccaatcctacttctctatgactatccacctctttatcagacctagcataaaaaattacacaggttggccaggcgcggtgactcacctgtaattccagcattttgggaggccaaggcaggtggatcatttgaggtcaggagtttgagaccagcctggccaacatggtgaaaccccatctctactaaaaatacacaaattagtcagtgattacaggcatctcagcccttttagatcatgctcaccaagcatcctccctggccactgcatggtttcaataacctcccacgcacttgtaacatccaaacctataactccagccccgctccagaatcaaatactcagctaccctgtggagatagctgaccgactccaagcctaatatgggtgtgacagagccgatcactgctctaggtgccgcttttcctctcttgctgaatgattccaacatccacttatttgccccaaactcctagagattactccatcttcttccctcatcctcagccccaaatactatatttccttcatataacacctgctgtcatttacggtaatcactaactggagcccctaccccccaataaccttagagctctgcaaacaaacagatgtggggaaccagactacgccaccccaaaatatgcccctttagcataaggactgttgaactgaaggcaattaagaagtgggcatgggctggacgcagtggctcatgcctgtaatcccagcactttgggaagccaagagggtggatcacttgaggtcaggagttcgagaccagcctggccaacatggtgaaaccccgtctctactaataatataaaaattagccaggcatggtggtaggctcctataatcccagctactcgggaggttgaggcacaagaattccttaaacccgggaggtgggagttgtagtgagccaagactgcaccatggcactccaggctagagtgagactctttctcaagagaaaaaaaaaagtgggtgcagaaaggctctctatcctctttccatttgcccaaaagcaaatagagacacaggacagagagctgactgtacttggaaattgctaagagagtagattttgggggttctcaaaaaaaagtatgggaagtaatatatatgttttgttttgttttgttttgtttttgagatggagtctcaccctgttgcccaggctggagtgcagtggcacgatctcggctcactgcaacctccgtctcctgggttcaaacgattctcctgcctcagcctcctgagtagctgggattataggcacccgccaccatgcccggctaatttttgtatttttagtagagacaaggtttcatcatgttggccaagctggtctcaatctcccgaccttgtgatctatccgtcttggcttcccaaagtgctgggattacaggcgtaagccaccgtgcccagccagtaatatgtatgttaattagctcaatttactcagtccacaatgtatacaaatttcaaaacatcatcttgtatatcataaatatatacaatgctttgtcaatgtaaaaaatgaaaaagtgccgggcacagtggctcacgcctgtaatcccagcactttgggaggccaaggcgagcagaccgtttgaggtcaggagttggagaccagcatggccaacatagtgaaaccccgtctctactaaaaatataaaaattagccaggcatggtggtgagcgcctgtaatcccagctactcgggaggctgaggcaggagaattgcttgaacccaggaagcggaggctgcagtgagcccagatcatgccaccgcactccagcataggcgatagagcaagactttgtctcaaaactaaaacaacaacaataacaaaacgaacacaaaagaaaccaacgaaaccctaactcaatgcactccaacctgggcgacagagcgagactccatcttaaaaaataataaataaatacaaaattcaaaattacacacctggctcacatatttccacactgggtactgctatcttgtaagtatccacattttacaaagaataagattgaagacacagagaggctaagctcccagtgtaacacagctgattagtagcacagctgagacttaaacccagaccacgtggtttcaaagtcagaggacctagccactaggctacactgctgaatgctgttgcctccatatgcttcatccattattgtgggaaggggtaactgaggatcagatacctgctccccaaggaagccctttcacctcgattgtccaccctggacaggagttgagcaacatgtttggacttgtctgcctctcccctgcagattctcaaccagggctgatgtcaatcttcttcattcacatcacacaagcaaaaggaaactatttgtgagtgtcaggtggaagaaaaagtaaggtgtggaacaaaaaacaattgtatttctggatggttgcgtttcaaataaacgaaactcactctctgtgagtgtggcccgagggacagaaccagggtcaccacccggcttccagaaacacctatttccagcagaagcgccctcaacggatcagggtcactgggattcaagacctggccccttcctaggactttaggggctggcctcccagggagaagatagaagaggaaggtgagctcttttctttgtctttttttagaacacttctatctggagccacacgcccctgtcactaacgccacaccgacccacagtcagagttactcatggtcagactcaccctaaacctatcctacacgcccagatgcagccattcccaagcccttacccaccgctggtatgctccctcagggacgtgcagcctcagagatatacttcaacagcatcttcacacaaccccccgaccctctgagacccacctgcttacaaacatacaaccagttatttggccctacaacagcatcattttcttttctttccttttcttttaatttaataattgcaagggagcttcgtagttctgtttctggtcacatattcccttgcaaatcatgccataaaggctgggtgcggtggctcacgcctgtaatcccagcattttgggaggctgaggcaggtggatcacgaggtcaggagttcaagaccagcctggccaacaaggtgaaaccccgtctctactaaaaactacaaaaaaattagctgggtgcggtggcaggtgcctgtaatcccagctactcaggaggctgaggaaggagaatcgcttgaacctggatggcagaggttgcagtgagctgagattgtgccaccgcattccagcctgggcaacaagagtgaaactgtctcaaaaaaaaaaaaaagaaagaaagaaagaaaaaagaaaaagaaaaggagaaagaaaatcatgctgtcgtcatgcctgtaaccctgcactttgagaggtcgaggcgggtggatcgcttgagcacaggggttcgagaccagcccaggcaacatatggagaccttgtctatacaaaaatacaaaaattatctgggggtggtgtcgcgtgcctgtagtcccagctactcaagaggctgaggcaggaggatcgcttgaggtcaggaggtccaggctgcagtgagctgagatcacaccaccgcactctagcttgagtgacagcctctcgagtagctgggactacagttgcgtaacaccacacccagctaatttttctatttttgtagagacggggtctccccatgttgcccaggctggtcttgaactcctgggttcaagcaatccactctccttggcctcccaaagtgctgggattacaggtctgaggatggcatcaagggaatacatgactagaaacagacctccaaacctcccttgcaatgattaaatctaccctccacattgcaagtcacccctttataggataaaagctttaaggaaacatgaccgggcgcggtggctcacacctgaaatcccagcacttagggaggtcaaggtgggtggatcacctgaggtcaggagtttgagaccagcctagccaacatgatgaaaccccacctctattaaaaataaaaaacttaggcaggcatggtggcacacacctgtagtcccagctactcaggaggctaaggcaggagaatcgcttgaacccgggaggcggaggttgcagtgagccgagttagtgccatgcactccagcctgggcaacagagcaagactccgtctcaaaaataaaaacaaaacaaaaaacaagaaacatttattttctcacataattcgtgtgagccaggagttgaagggcagcttagatgggtgcttagtggctttcaagaggttgaagtcaaatgtcctctggggctgcagtcatctgaaggcttgatgtgggctggaggatccagttccaaggtggctcattcatttgcttggcaaattagtgctggttgtgggcagaaaacctcagttcattgccatgtaggcctctctatagagctgcttgagtatcctggtgacaatatggaagcagtcatgtcttttatgatgtaaattagtgccaggagctgggcacggtggctcactcctgtaatcccagcactttgggaaaccgaggcgggcagattgcttgagttggagacaagcttgggcaacatggcgaaaccccacccctacaaaagatacaaacattagccaggcttggtggcgtgcacctgtagtcccagctactctggaggctgaggcaggaggattacctgggaacctgggaggcggaggttgcagtgagccaagatcccagcactacactccagcctgggtgacagagggagacttcatctcaatcgatcaataaataaattaggtacaggtgtggacgatggtcctcaggtattataccttaaacaccttgagtacgacttctcttgatctaaagaccaataaatttgccttcactcactcttctttctttttgaagttccgggcttctctttgatatcatttcccttcagcctcaataactctctttactgtttcttttagagcaattctgttgatgatgacttcttttcattttcttttacctatttattttactattgttcctcctagatattttcactggtatagaattcttagtgaatcgtcatgttctctcagcattttagaaacattgttccattgtgttctagagtccatggtttccagtgagaaatccagtcattcaaatcattgtttgctagagggtgtttggtgtttggtgtttttcttttttttaagagatggggtctcgctatgttgcccaggctggactcaaactcttgggctcaagcgatcctcctatctcagctacccaaatagctgaaactacggacatgtactgcgttattaattcaagcctctgcattttggggtcgtttcttctataacaatagataactgggacaggcgcagtggctcacgcctgtaatcccaacactttgggatgccaaggtaggcagatcgcctgaggtcgggagttcaagaagagcctgaccaacatggagaaaccccatctctactaaaaatataaaattaactgggcatggtggtgcatgcctgtaatcccagcactttgggaggccacggccggtggatcacctgaggtcaggagttccagactagcctggccaacctggtgaaaccccgtctctactaaaaatacaaaaattagctgggcgtggtggcaggtgcctgtaatcccagctattctggaagctgaggcaggagaatcacttgaacctgggaggcagaggttgcagtgagctgagatcgcaccactgcactccagcctgggcgacagtgagactccatctcaaaaaaaaaaaaaaaaaaaaaagtgtggggattacaggcagagccaccatgcctgctgtctgtgtctgttttgttgagccaccaacaggctgttaacttgagtacatttcttctgctctctgacttagtgtactcatctggaaaatgggggtgaatgtgctcccacactgctgagctgtagagggccttaaatgagttaatctctccctgaaatctctctgtgaatggcccaaccgtaatcagattccgtaaagggtagctgtggtcattcttcttttttccctcctcccctcttccactcattctggtgacccaagatttcccagttctttacctatgactcaccccacctcagagctttttctttttctttttttcttgagatggagtcttgctctgtcacccaagctggagtgcggtggtgtcatctctgctcactgcaacctccgcctcccaggttcaagcaattctcctatctcagcctccagaacagctgggattacagatgcacaccagcacgcctggctaatttttgtatttttagtagagacagagttttaccatgttggccaggctggtctcgaactcctgacctcaagtgattggcccaccttgacctccgaaactgagctttttttttcccttccttttttttttgagacagagtctcactctgtcgcccaggctggagtgcagtggcgcaatctcggctcactgcaacgtctgcctcccgggttcaagagattcacctgcctcagcctcccaggtagctgggattacaggcgagcaccaccacgcctggctaatttttgtattttagtagagacagggtttcaccatgttggccaggctggtctggaactcctgacctcaagtgatctgcccgccttggcctcccaaagtgttgggaatacagacgtgagccaccacgcccggcccagaactttttcttacaggcctcttggaccacctgacccagatacaggacatttcctacaactccagaggaaaatccccttcttccttcctctacggaagtgaccgagagaaagtaacactcactgtttcctctcttccagacccttctgaaaattctaattccagaaagctcatcttataaaccaaaaataaaattctaagccccctaaccgacttcatagacccctcttttggccaagaggatcccaaaggaacctgaaaaactagttcagcccatgataaggagaggatttggacatccctcattgtacccctccctttggagtttaagcacaactgactagcattaacattaaaacagaggcccagagagttggccaatatattgtctttttgtttgtttgtttttgagacagagtttcgctcttgttgcccaggctgaagtgcagtgatgcgatctcagctcactgcaacctccacctcccagatgcaagtgattctcctgcttcagcctcccaagtagctggaatcacaggcacgcaccaccacgcccggctaattttgtatttttagtagagacggggtttcaccatgttggccaggctggtctcaaactcctgacctcacgtgatccacccaccttggcctcccaaagtgctgggattacatgtgtgagccaccatgcctttttgcctttctaacggagcccctggcaaattcaaaaactgttttgctctctgtctgcaagtctccctggcagatccctcagttatattcgtacccaccccttgaatgctgtggcttccagagatccaccggaacaccaaagacttccattctcaaccacctgaatctccggaatcccctgcacccacctcctctcccagtgtttcacgaatcagctaatccttcaaggtctttaaaatgtatccacgtcttcctcctggattattgcctcctgatagcctctctgatttctttccaccttgtgccctaacagtctgctctttgtacagcagccagaaggaggctgtgaaaaataagagtcaaagcatgggctgggcgtggtggctcatgcctgtaatcccagcactttgggaggccatggcaagaggactgcttaggcccaggagttcaagataaacttaggcaacatagcgagaccctgtctctacaaaaaaaaaaaaaattaaaataggccaggcgcagtggctcatgcctataatcctagcactatgggaagcagaggcaggcagatcacctgagttcaggagttcaagaccagcctggccaccatggtgaaactttgtctctacaaaaatacaaaaattagctgggcatgatgacgggtgcctgtaatcccagctactcaggaggctgaggcaggaaaatcacttaaacccaagaggtggaggttgcagtgagctgagatcatgccattgaactctagcctgggcaacagagcaagactccatctcaaaaataaaataaaataaaaaatgagccaggtatggtagtgcacacctgtagtcccaggtacttgggaaactgaggcaggaggatcacttgagcccaggaggttgaggttgcagtgagctgtgatcagccactgcactgcagcctggggcacagagcaagaccctgtccaaaaaaaaagaaaaagaaaatgatagaccagagcttaatgtctttccatggttctgcatatatgtcagagtcaaaactaaattccctccaaggacctattggtttgtccctgcccttatgtccctccccagattccttctctcccacctcgttcactctgtttcagctgctctggtttacttgctgtttctcaaactcactcctgcctcaagtcccttgcatttcctggaacatccttccacctacccaaatacctaaatagttccatcctcacttcattaagtcctctgctcagatgtcacctcttcaaagactgtgctacctcacccctgaaccctgacacccactacctctcttgacattgtaggtgctcagtaatgtttgtgggatgaaaacatgatggaaaagagcttctgctcaaagctttttctccttttttctttctctccttccttccttctttccttccttcctgttttttttttttctttttctttttttttttttgatacatagtctcgctctgtcacctaggctggagtgcaacggcgcgatcttggctcactgcaacctccgcctcctgggttcaagcgattctcgtgcctcagcctcctgagtagctgggattgcaggtgcccgccaccatgcccggctaatttgttgtatttttagtagagacggggtttcaccatgttggtcaggctggtctcaaactcctgacctcaggtgattcatcctcctcggcctcccaaagtgctgggattgcaggcatgagccaccacgcctggcccttccttccttcattccttccttcctccctcccttccttctttctttctctttctttcatcttccttccttctctttctttctccctttctgcttccttccttcttttccgtccttccttctctttctttttctctttctccttccttccttccttcctccctgcctccctccctccctctttttctctctctttctctctttctttcttccttgttttgccatgttgcccaggctgctcttgaacttctgggctcaagggatcctcccagctcagcctcccaagtagctaagactataggcacgtacaaccatgcctagctaatgttttgtatttttagtagaaatggggttttcccatgttgcccaggctggtcttgagctcctggactcctggactcaagtactcttcccacctctgcctccaaaagtgctagggttacaggtgagagccactgcgcctggccctctctctctcatctcagatttttctctccaccttagccactcccagatgttctcctcactcctgtctccttccgttgaaaaaccaccctcaagctactggtggatgaagggtgtggaccaccccacccctggatcaaacccccaagccccacctctatcacccacagctatatttccttgagcaagttgcttaatctctccaagcctcagtttcctcaactacaaaacatatacaaatagaaagtgatacatgactgcttcattgtagtaaccattgcaccatctgcatgtatcccacaatgtcatgtagcaaacaacaaaaattattaaaaagaaaaaaagacgatctgatctcacagatctgttaagaggattaaatgggattattcatgtaaagctctccatttgtgatgtcatagtgtaaatatcaaattaacggtggaacgagctgttgtaatcaattcttatctaaatacgaccaataataacaatgcttaatgtgattattactaaccatagttgtatttcctcttatattaacctcttagtctctccttaccatattatagatcatcaataaatatttattgaatgaacgattgaatgaatggttattgaatttttgtaaggaggaaaagatcacggacttcttataaaaaatataaaagtcagtccagatgcgatggctcatgcctgtaatccagcactttgggaggccgaggtgggctgatcacttaaggtcaggagttcgagaccagcctggccaacatggtgaaaccctatctctaccaaaaaaaaaattagccaggtgtggtggtgtgcacctgtaatcccagctactcgggaggctggggcaggagaatcacttgaacccaggaggcagaggttgcagtgagccgagatcatgccactgcactccagcctgggcaacagagtgaaactccgtctcaaaaaaaaagaaaaagaaaagtataaaagccaggtctgtggccaggcacaatggctcaacacctgtaatcccaagactttcagaggccaaggcgggcagataacttgaggtgaggagtttgagaccagcctggccaacacggtgaaaccctatctctactaaaaatacaaaaaattaggccaggcttggtggctcgtgcctgtaatcccagcactttttggggccgaggcaggtagatcacgaggtcacgagctcaagagatggagacaatcctggccaacatggtgaaaccctgtctctcctaaaaatacaaaaattagctgggtgtggtggcgcgcctgtagtcccagctacgtgggaggctgaggcaggagaatggcttgaacccaggaggcggaggttgcagtgagccgagatcacaccacttgcactccagcctggtgacagaacaagacttcgtctcaaaaaaaaaagaaaaattagccaggcatggtggtatgtgcttgtaatcccagctactagggaggctgaggcaagagagtcgtttgaacccaggatgcagaggttgtatgagctgagatcacaccactgcactccagcctggaggacagagtgagactctgtctcaaaaagaaaaaagaaacaaacacaactgggtcaggcaaggtggctcacacctataatcccagcactttgggaggctgagatgggaggattgcttgaggccaggagtttgagacccacctgggcaacatggtgagaccccaatttctactaaaagtataaaaattagtgccgggcacagtggctcatgcttataatcccagcactttgggaggccaaggtgggcaggtcacctgaggtcatgaattcgagaccagcctgaccaaaatgatgaaaccctgattctactataaatacaaaaattagccgggcgtggtggcactcgcctgtaatcccagctacttgggagactgagacaggagaatcacttgaacccgggaggtggaggttgcagtgagccgagatcgcgccattgcactccaggctgggcaacaagagcgaaactccatctcaaaaaaaaaaaaaaaattagccaggtggcagggcacagtggctcacgcctgtaatcccagcactttgggaggccaaggcaggcagatcacaagatcaggtgtttgggaccagcctggccaacacggtgaaatcccatctctactaaaaatacaaaaattagttggacgtgttggcgggcgcctgtaatcccagctactcgggaggctgaggcaggagaattgcttgaacccgggaggtggagtttgcagtgagccgagatcacgccactgccctccagcctgggtgacagagtgagattccatctcaaaaaaaaaaaaaattagctgggcatggtggtgcgtgcccatagtctcagctccttgggaggttaaggcacgagaatcgctggaacccaggaggaggaggttgcagtgagccaagatcgtgccactacactccagcctggctaagagagagactctgtctcaaaaataaaaacaaaagagttattggcctggcgtggtggctcacgcctgaaatcccaacactttgagaggccaaagcaggtggatcggatcatctgaggtcaggagtcagagaccagcctggccaacatggcaaaaccccatctctactaaaaaaatgcaaaaaatagccaggcgtggtggtgcgtgcctgtaatcccagctacttgggaagctgaggcaggagaattccttgaacccgggaggtggaggttgcagggagctgagatcgtgccactgcactccagcttgggtgaaagagctagactctgtctcaaaaaaaaaagaaaaaggttcttgtaaggactctgtgagatggaccacaggcatgggtctcggcacaatctgtttgtttgtttgtttgtttgtttgtttgtttgttacggagtctcgctttaccccccaggctggagtgcagtggtacgatctcggctctctgccacctctgcctcccgggttcaagtgtttctcctgcctcagcctcccaagtagctgggattacagacacccaccaccacgcccggctaatttttgtttttttagtagagacagggttttgccatgtttcccgggctggtctccaactcctgacctcaagtgatccgcccacctcggcctcccaaagggctaggattacagaagtaagccagtgcacctggccagcacaatcgttcttgctccctagatgtgaactgctgttttcaccagcaggagctaaggggcaggctgtctcagattagatgctttttagagcactctgtagttccttaaatggagctgcaaatccacaggttgctgctcaatgtctgactagcttctactttatttctgactttatttctcatctgtctccaccacacccctcccttccacataccctgcattccagcaaaactgaccaatgcatcacatgccagacacaccctgtgatgtctaccccaggacccttgcacaggcttctgcctcaagagagctcatgatccagtggacaggcgtgggcattggaatctcacaagcccagatcacctcccagtttcacctcttcaatgctattgacctttggggactgacaaaacctctctgaacttcagtttgcccagatatagcatggactgaaaaaatgtgtaccttctaggtacaagtcatgcctcactcagcaacggggatatatcctgagaaatgcatcactaggcaattttgtcattgtgcaaataccatagagtgtacttatacaaacctacatggtatagcaactacacacccaggctgtagggtatgacctctagattttacatatatatatatatatatatatatatatatatatatatatatatatatataaatatatatattttttttttccagatggagttttgctctttcgcccaggctgcagtgaagtggcacaatctcagctcactgcaactgctgcccccaggttcaagtgattctcctgcctcagtctccccagtagctgggattacaggcacctggcacctcacccggctaattttgtacttttagtagagatggcgtttcaccacgttggccaggctggtctcgaactcctgatctcaggtgatccacccgcctcagcctcccaaattgctaggattataggtgtgagccactgcgcccagccttaaaatttatattttaacttaaaatatatttacaactagagatgggtctcactatgttgcccaggctagtcttgaagtcctgggctcaagtgatcctctcaccttggcctcccaaagtcctgggattatggatatgagccactgcaccaggccaatgataagcgtttgtgtatctacatgtatttaaacatagagaaaggacagtaaaaatacagtattacaatctcttgggaccactgtcatatatgcagtctgtcattgactgaaatgttgttatacagcacataattgtactgaatgaggattaaagctaatgggacatttagccaggtgcagtggctcacgcctgtaatcccagcacttgggaggccgaggtgagcagatcacctgaggtcaggagttcgaggccagcctggacaacatgttgaaacccctgtctctactaaaaatacaaaaattagccgggcgttgtggcaggcgccaactactcgggaggctgaggcaggagaatcagttgaactcaggaagcagaggttgcagtgagcagagatagcaccactgtaatccagcctgggcaatagagtgagatgctgtctcagaaataaataaataaataaataagtcgggcgaggtggcttacgcctgtaatcacagcaccttgggaggccaaggtgggtggatcacgaggttaggagttcaagacccgtctggccaagatggtgaaaccccatctgtactaaaaatacaaaaattagccggacatggtggcaggtgcctgtaatcccagctacccaggaggctgaggcagagaattacttgaacccagtaggtggaggttgcagtgagccgagattgtgccactgcactccagctttggcgacaaagtgagactctgtctcaaaaaaaaatatatatatatatttatatatatatatacacacacacatatatacttacaatacataataatattaataacatgatataaatattaacaacttagtataatgatagtaaggatttaccatgtcaggcatctttccaaaaactcttaatatattaaatcatagaattctcacaacaacttttttttttttcaaacggggtctcactctgtcacccaggctggagtacagtggtgcgatcttggttcactgcaaccactaactcctgagttcaagcgattctcctacctcagccccctgagtagctgggactacaggagtgcactaccatgcccagctagtttttgtgttttaagtagagacagggtttcaccatgttggccaggctggtctcaaactcctgatctcaagtgatctgcccgcctcgacctcccaacgtgctgagattacaggcacctggcaccgtgcccagctcgtttttgcatttttagtagcgatggggtttcaccatattggccaggctggtctcgaactcctgacctcaagtgatctacctgccttggcctcccaaagtgctgggattacaggcattatctactgcaccaggccctcacaacaacattttgatagtactattattaagctcatttcacagatgaggaacctgagagaggtaaggagaagtacaataatctgcctaaggtcgtcgtggagctactaattggctaagcagctcctggaagtctcgctagagagtgtcactgtttaatggaccgttggacatttcctaagccttgggtgtgttttacatcattcactagccatgcacagctagtgagctcttgcaatgcagctactggggctaccacagttgtagccataatgctatgtactatgggtgaggaacttaattttttttttttaatttgtattagccaagcatggtgatgtgcacctgtagttccagctactcgggaggctgagatgggaagatcgcttgagcctaggaggtggaggctgcagtgagctgtatttgtgccattgcactccagcccgggtgacacaatgagatcccatctcaaaacaaaaaccaggtcataggtagataaagagacaaaaggttgccttcttttgagtttctgatgagcctctccaaaggagccaatcagatatgaatgtatctaagtgagcacaggagggactctgaatagaatgagaggcaggttggccctgagcagttcccagcttgacttttcgctctagcttaatgattttgagaggtgaagcccgctgggcttctgggtcaggtggggacttggagaacttttctatttagctaaaggattgtaaacgcaccaatcagcattctgtgtctagctaaaggtttgtaaatgcaccaatcaggactctgtaaaaacacaccaatcagcgctctgtgtctagctaaaggtttgtaaacgcaccaatcagccctctgtaaaaacatacctatccgcgctctgtaaaaacggaccaatcagccctctgtaaaatggaccaatcagcgatctgtaaaatggaccaatcagcaggaagtggttggggccaaataaggtaataaaagctggccatctgaaccagcagtgccaacctgctcatgtccccttccacattgtggaagttttgttcttttgttcttcataataaatcttcctgctgctcactctttgagcccacactacttttatgagctgttaacactcactgtgaaggtctacagcttcactcctgaagtcagccagaccaggaacccactggaaggaagaaactccggacacatctgaacatctgaaggaacgaactcgggacacaccatctttaagaactgtaacactcactgcaacggtctgcggtttcattcttgaagtcagcaagaccaagaacccaccggaaggaaccaattccggacacaatctggggaccccgaaatttactttcccttcacagtcccctccctcttccttctttctcctcctcacttcctttgtctctctcccctttctcctcactcttccctcatctgattctctctccatctgtctccttttttgttgttgtggtggtggttgttgagttggagtctcactctgttgcccagtctggaggctaatggcatgaccttggctcactgcaacggctgcctcccgagttcaagcaattcttctgcctcagcttctcaagtagctgcgattataggcacgcacctggataatttttgttttgttcttttttttgatggagatggggtttcactgttttccaagctggtatcgaactcctgggtgcaagtgatcctcccgcctccgcctcccaaagtgctgggattacaggtgtgagccactgcccccagttccttctctctcttctgtctgccgcttctcatcccttccacccaaccagggcgggagagggagggggatgaaaccaggacggggaggtgggagagggatgaaaccagggcggggaggtgggagagggatgaaaccagggcggggaagtgggagagggattacaaactccctctatttactctcaagcttctctgtttccacctccactaaccctggaaccctgaggcgccccaggcctgcagtgtataaatgccttcctggcaggccttgctgagacttgagctcagcagtcctcaccctccttaatcctaaccaaacaggatctgtcactaggctcagcgtgcagaggacgcctcgggtccttttcctcctgcgaaaccacagaggcagccctaggggcaaacaataaaacagtgtggagggctgggggatgagggtgggagcatgcctggcagggaacgtttctttttttttcctccttcaaaaattggaggggaggcctggcgcggtggctcacgcctgtaatcccagcactttgggaggccgaggcgggcggatcatctgaagtcaggagttggagatcaaccagaccaatatggtgaaaccccatctatactaaaaatacaaaaattagccaggtgtggtggtgggaggctgtagtccgagctactcaggaggctgaaacagaagaattgcttgaacccgagagttaggtggcagtgagccgagatcgtgccattgccctccagcctgggtgacagagtgagtctcaaacaaacaaacaagcaaaaaaaaaaaaaaaaaacaaggaaggggatcaaaactgtcagttgggacaaatacaggctttactatggtaattctctggctttgagccaaggactgcaccctccccagggggcagcgctgagagctaagtcacccaggatggtttaaaattaaactcaattttcaacattgtaactcctcacagacaaacacaactgtgtttactaatagcatttctcggttttatctgacttttgagttctgaagtcgggagatgtggaggctggaagtataaactgagacgaagtgggcagaacagctccctcccggcttccccatccccagccagcctctctgattttctttttctttctctttttcttttttttttttgagatggaggcttgctctgtcacccaggctggagtgtagtggcccgatctcagctcactgcgacctctgcctcccagactcaagtgattcttctgcctcagcctcccaggtagctgggattacgggcacgcgccatgatgccaggctatttttttatttttatttatttattttttaaagtagcgatggcgtttcaccatgatggccaggctggtctcgaactactgacctcaggtggtccgcccacctcggtctcccaaaatgctgggattacaggcatgagctcctgcacctggcccagcctctctggttttgatctaagtcatgcccaaagcttggaagcggctttacactacctttctttgctcaaaaatttgccatccatctatctgtctgtccatgcaataaatatctagtgatctaatagaggctgaattctgtgctaaaagctaaggattatggtattatttatttatttatttatttatttatttattttgagacggagtctctctctgtcacccagaccggagtgcaatggcgtgatgtcggctcactgcaacctccacctcccgggttcaagcaattcttctgcctcggcctcccgagtagctgggattacaggcgtgccccaccatgcccaactaatttttgtatttttagtacagatggggtttcaccatgttggccaggctggtctcgaactcctgacctcgtgatccacctgcctcagcctcccaaagtgctgtgattacaggtgtgagccatcgcgcccggccctattattactattactactataacaataaaaacagcaatttatttatttatttattgcaagacagagtcttacactgttgcccaggctggagtgcagtggcagatcacggctcactgcagccgcaacctcccaggctgaagctatctttctgcctcagcctcctgagtagctgagaccacaggtgtgtgccactatgcctagctagttctttaatttttgtagagatggggtctagctatgttgccagggctagttttgatttttttttcttgtagaggtagggtcttgctgcattgcccaggctggcctcgagctcctgggctcaagcgattctctcgcctcaggctctcaaagtgctgggactttggctgggattacaggcgtgcaccatcatgcctggctaatttttgtattttttgatagagacatgatttcactgtgttttcccggctggtctcgaactcctggcctcaagtgatcctcctgcctcggcttcccaaagtggtgggattacaggcatgagccactatgcccagctccatctctctcttctatctgctgctacttctagaatacgtagtgggcgcagaatagggactatttaagtgtttgctggccagacatggtatcccatgcctgtaatcccagtactttgggagacacatagcccctattctgtacccactacgtattctaggagttgtttatttagtccttctagaaacatttcaaacctgatgtggtggctcacgcctgtaaccccaacactttgagaggctgaggcaggagaatcgcttgaacccaagagtttgaggccaggctgagcaatgtagcaagaccctatctctgcaagaaaaaaaaaatcaaaaaattagtcaggcatagtgatgcacctctatggttccagctacttgggtggctgaggtgagagcattgcttgaacccaggaggttgaggcttcagtgagctgagatcaccttgccactgcattccagcctgggtgacacagcaagaccctgcctcagaaataaataaataaataaataaataaataaataaataaataaataaaaacccttctacatctcccattttatagaggaggatacagaggttcagagaggcccccaagtcgtatggctgagctgggatttgaacccacaatgatgggtgctcttcaccaccttgcagcttgccactctcatgaaaaacatacagtctggtgcggcacacatgataactacacaaacaaggtaattcagatatttaaatgctctaaagattctacatcaggttatttccagtattattttcctggtcatccctggaaggatgagaaggaaccaaccttcagaagagctgcagagagaacacccagacagagtaaaaagcaagtgcaaaggccctgtggtccaaaccacttaaaaagatttggaagcagcagaggtcagagtagcaggaaggaagagacaagaggcaacagagcaggatatgatgatttcaggccacagggggagtttgggtttcgttgtttcttttttgagataggttctggctctgtttcccgggctggagtgcagtggtgcagtttcagctcactgcctatcttcacctcccgggtcaagccatcctcccgcctcagcctctcaagtagctgggattacaggcatgtgccatcacgcctggctaattttttttttttttttgagacagagttttgctcttgttgcccaggctggagtgcaacgatgcgatctcggctcactgcaacctccgtctctcaggttcaagcgattctcctgcctcagcctcctgagtagctgggattacaggcatgtgccaccatgcccagctaattttgtatttttagtagagacggggtttctccttgttggtcaggctggtcttgaactctcgacctcaggtggtccacccgcctcagcctcccaaagtgctgggattacaggtgtgaaccaccgtgccaggctttaattttttttttttttggagatggagttttgctcttgttgtccatgctggagtgcaatggcgtgatctcggctcactgcaacctccgcctcccgggttcaagcgattctcttgcctccgcttcccgagtagctgggattacaggcgcctgccaccatgcctggctaattttttgtatttttagtagagacggggtttcaccatgttggccaggctggtctcgaactcctgacctcaggtgatccgcccgcctcggcctcccaaagtgctgggattacaggcatgagccaccgtgcccagccgttaatatttgtattgtttgtaggggcatggtcttgctatgttgcctaggctggtttgggttttatccccagtaggacaggattctaggagcacagcagggatggggtggccattttacaagcactccaggggtggggttggtaaaagcgtcacgtcccagctgtcctccctctaggatgtttatcacccctgtcctgcaagatctaattctatgatgtctttgctgcccctgaatgacaacaacaaggcagattaccccaactctttcccctctgctgtatatttaagcacctcccctttgactttatatcctggactagtctgtgtaaagacaaagaaaaacgagaaacaagaggcttaattcttcctgtattctggtttcggggaagggtcaaaatataacttcagtggatgccttgctccaaattgcaaaactccctcctgtcatgatgaaagatgtgtttttcccctggataaagccaattagctcacaccgtcgtcacaatgactaggtggctccaggatgaactatgcgtttgataaacggtgctgtcaagttctgttactggagaactaatgattatttatcatgaggcatgaaggtgacaggtttatctgcttggctatagaaaaagggtgagatgtaggctggacacgatggctcatgtctgtaatcccagcactttgggaggccgaggtgggcagatcacaaggtcaggagctcgagaccatcctggcaacacgttgaaaccccgtctctactaaatatacaaaaaattagccgggtgagatggtgggcgcctgtagtcccagctactcgggaggctgaggcaggagaatggtgtgaacctgggaggcggaggttgcagtgagccgagattgcgtcactgcactccagcctgggcgacagagcaagactctgtctcaaaaaaaaaaaaagaaaaagaaagagggtgagaggcaggctggacacggtggctcatatctgtaatcccagcacttagggaggatgaggcaggcggatcacttgaggctaggagtctgagaccagccatggtaagaccccatttctactaaaaatacaaaaatgagggctgggcatggtggctcaaatgcctgtaatcccagcatattggaaggccaaggtgggtggatcgcttgagttcaggagtttgagatcagcctggccaacatggcaaaaccccgtctctactaaaaataaaaaaattagccagacatggtggcgggcgcctgtaatcccaaaaaaaattagccagacatggtggcgggcgcctgtaatcccagctactccggaggctgaggtggaaggatcatttgaaccggggaggggaaggttgcagtgagccaagttcacaccactacaatccagcctgggcgacaaagcgagactccgtctcaaaaacaaaacaaggccgggtgcagtggcgcatgcctgtaatcccagcactttgggaggctgagatgggtggatcacaaggtcaggagatcgagaccatcctggctaacacggtgaaaccccatctctactaaaaatacaaaaaaattagccgggcgtggtggtgggcgcctgtagtcccagctactcgggaggctgaggcctgagaatggcatgaacccgggaggcagaacttgcagtgagccgagattgtgccactgcactccagcctgggcgactgagcaagactctctcaaaaacaaaacaaaacattagctgggtatggtgtctcttgcctgtaatcctagctactcaagaggctgaggcaggagaatcgcttgagcccaggaggcggaccttacagtgagctgagatcactgaactgcactccagtttgggcgacagagcgagactctgtctcaaaaaaataaataaataaaataaatgaaaaagggcaagatttctttctgcctttgcaatgtcctaggccttatctacgacgtgcaccacactctggatgaatgcttattcagtgataacattaaggggtatttttttcctttcccttctacttttgtggagaggtttcctgagttgagagaagattcttgcatttagttgtatttccacaacatcagcacgtcctacattttttaaatctgcccagccagcctgaatttcaggaagccagagaggccctagttggttgctcttatttatttacttagagacacagtctcactctgttgccccaagctggagtgcagtgatggaaatctccgctcactccaacctctgcctcgtggattcaagtgattctcgtgcttcagcctcccgaggagctcggattacaggcactgaccaccacacccagctaatttttttgtatttttagtagagatagggtttcgccatgttggccaggctggtctcgaactcccaacctgagttgatctgcccgcctcggcctcccaaagcgctgggattacaggtgtgagccacggcgcctggcctgttgctataattttagagaaacacagtgggctctatcattagtcctgggttcaaatcctgtgtggtcctggataggccactcaaattctgcctgtttcctctctagtaaattagggttacgtctgacagcatctattttggagagtcattgctaggactaatggtgacaaagagcttaatacagatcctagcccagatcaaacaattttagttaatagtaataaccaccttgcttttaggatagctgagactcactgggccagcaccatgccaagctcctatcttagtaacaatgaaatgaggcctacctttacaataaaagctaacatatcctgttggccatgtggcaggcactgggctaattcctttttagttttttaaattttttagagacaggatctggctctgtcacccaggctggagtgcagtggcatgatctcagctcactgcaacctctgcttcctgggctcaagtcaccctcccaccgcagcctcctgagtagctgggactacaagggtgcaccaccacacctggctaatttttgtattttttgtagagacagggtttcgccatgttggccaggctagtcttgaactcttgagctaaagtgatccgcctgccttggcctcccaaagtgtggaattacaggcgtgagtcaccgtgcctggctgtctgcctttactttctttctgtcctttttttttttttttttttttttgctttgagacagagtctcaatctgttgcccaagctggagtgcagccgaacaatcatacctcactgtagcctcaacctcctggacccaaatgatcctccgacctcagcctcctgagtagctgggactacaggcacgtaacatcatgcctggctaatttttattttatttttagtagagaaggttttgctgtattgcccaggctgttctcaaactactgagctcaagtgatcctcccatcttggcctcccaaaatgttgggactgcaggcctggctaattaaaaaaaaatttttttgcagagatgggggtctcacaatgttgcccaggctcgtcctgaactcctgggctcaagcaattctcccacctcggcatcccaaagtactgggattacaggcaagagccactgcgcctggcctctctttgcatttttcttttcttttcttcctttctttcctctccctctctctctctctctctctcccttctcttttttgagatcaagtctcactctgttgcccaggctggagtgcagtggcgtgatcttggctcattgcaacctccacctcccaggttcaagcgattattgtgcctcagcaacccaagtagctgggactataggcgtgagccaccacacctggctaatttttttttttgtatttttaatacagatgaggtttcaccatgttggccaggctggtctcgaactcctgacctcaggtgatctgcccatctcggcctcccaaagtgccgggattacaggcataagccacctagcccggcctgcatttttcaagactacaataaactgtcattaactatcgtcaccctgctatacaatagatgtcttgaattttttcctcccatctaactgtaattatgtatctttttaccacctctcctcatccatcttcctcaacacccttcccagcctctggtaaccaccatggtaacctgcagacaccttcatctccaacttccggcctgcagaacggagagatgatacatttctgttgttgaggcctccagtctatggtacttggttatatcagcctcagaaaactaatgcaacctccaaatccctcatcgctccctctgagtgtcttgtctactttttctccagtgtcctgtaagtcctcaaagcctgcaggggcacatagcaggggctcaatgtacaaatgcccattcactgactacatgatcctcccaggagaggtaggagaaacatgagccagttaaagaagagagactggggtcgggtgcgatggctcatgcctgtaatcccagcactttgggaagatgaagcaggaggattgcttgagtccaggagttcaggaccagcttgggcaacatagggagaccctttttctctacttttatttatttttattttttatttttttggagacgaagtcttgctcctgtcccccaggctggggtgcgatggcatgatctcggctcaatgcaacctccgcctcctgggttcaagcgattctcttgcctctgcttcctgagtagctgggattacaggcgcctgccaccacacccagctaatttttgtatttttagagacggggtttcaccatgttggccaggctggtctcgaactcctgacctcaggtgatccgcccacctcagccttccaaagtgctgggattacaggcatgagccaccgcgcccagcctcctttctctatttttataaaaattcttgggctgggcgcagtggctcatgcctgtaatcccagcattttgggaggctgaggtgggcagatcatgagatcaggagatcaagaccatcctggctaacatggtgaaaccccgtctctactaaaaaatacaaaaacaaattagccgggcatgacggcgggcgcctgtagtcccagctacttgggaggctgaggcaggagaatggcgtgaacccgggaggcagagcttgcagtgagccgagttcgagccactgcactccactctgtctcaaaaacaaccaccaccaccaaaaaaaaaaaaaaaaaaaattcttggccaggtgtggtggcttacgcctgtaatcccaacactttggcaggctgaggcaggcggatcacctgagatcaggagtttgaaaccagcctgaccaacatagtgaaaacccatctctactaaaaatacaaaattagctgggcgtggtggcacacgcctgtaatcccagctactagggaagctgaggcaggagaattgcttgaatcaggaaggcggaggttacagtgagccgagatggcaccattgcactcccgcctgggcaacaagagcaaaactccgtctcgaaaaaaaataaataaaataaataaaataaaataagaattattaaaaaaaaaaaagagagagagagaaagagagaagagattgggaactggccccacgtctcctgctacaggaccttgggaaaatcctgaaccctttgaacctcagtttgctcctccataaaacggggccatcagaccatcagccaatatctctaagctccccgtgggattgtgaatcctacatgtcccccaccccaggcttgcatgaaaaataaggtttctcttgggtgccacacagagaggatcccttctgtgtccctcaagccatctgtgaccgtcccacttcataaaagcaaaggtcacttgctcattgaaacttcctctgtgccaggcaagagctgcatcgccccaacaggcccctcaagcaagatgctattatcattatcatgatgccctttttgcagatggggaaaagtgaggctcagaaagaccaagtccgcaggccccatctctactgaaaatacaaaaacattagcgcccgtaatcccagctactccggaggctgaggcaggagaattgctgagatcgcgccattgcactccagcctgggcgacaagaccaaaactctgtctcaaaaaaaaaaagaaaaagaaagtaaagggggagaaggaaaggaagagggtggttgggaacacagaagaggtgacaattgggtagggactcaagctggaaagggggacaaagtggaagctgggtgcagtggctcatgcctgtaatcccagcactttgggaggccaaggcgggaggatcacttgtgcctgggagttctagaccaacctggccaacacagggagacctcgtctctgcaaaatatttaaaaacaattagctgagctaggtggcacacatctgtggtcccagctacttgggaggctgaattgggagaagcacttgagtttggaggtctaggctgctgtgagccgtgatcatgccaccatactccagcctgggcaacagagcaagatcctgtcaaaaaaaggaaggaaggagtggggttgacatgcaaggccatttgaggatgggctgggacattgtggactcatttccctcctccccagaggaccagaaggagcaagagatccccttacctgtgggcagcaggtatctcagcattagtaacaccagggcccaccgccggcctccaggggcaccctgccacaggccagccattcacggcttcaggaagacttgggggctgctctttgccctcgttccagccccccagccaagcccagagacatgtccagcagctccaggcggccaggtgcctaagatctggcgggtatcaaatgtgcccagtcagcctaatccctgcgaggctgggcggggctgggaaggatcccctcgcctattcccaggccctgattggctccctgggcccttggttctgcctgtctgggctcccaggaagacagggctccatgggcattgaggggagcgggagtttcagctgccaggctcagctgcgggtgtcaggaaaagtctccctagaatgttccccagacccagagctgcactgcgactttcatgggccacaatcacttttgcaatttacccattacttttttttttttttttgaaaggaagtcctattgtgttgcccaggctggaatgcagtggtgccatcttgtctcacagcaaactccgcctcccggttcaagcgattcttgtacctcagcctcccgagtagctaggactacaggcacacaccaccatgcccagctaatttttgtattttttagtagagacagggtttcaccatgttggtcaggctggtctcgaactccctatctcaagtgatccgccagccttggcctcacaaagtgctgagattacaggcgtgagccacagcgcccagcctatacttacattcctccctccccagctttattgaaggatgattggcaaataaaacattaaatatcttataatttgtaataatttttgagcaaagaggctcccattttcactttgcactggaccctgcaaatcacgcctctggtcctgctgcaagcggtagtctctgctattccacagcagcctcatgttctctctctgtgacgctctgaattgtatccccctcaaattcacaagttgaagcctttacttccgatgtgactgcattcagcaacagttttcaggctgggcgcagtggctcatgcctgtaatcccagcactttgggaggccgaggagggtggatcacctgaggtcgggagttcgagaccaacctgaccaacatggagaaaccccatctctactaaaaatacaaaaatcagctgggtgtggtggtgggcacctgtaatcccagctactcaggaggattcaagcgattcttctgcctcagcctcccaagtagctgggattacaggtgcacgccactacacctgggtaattttttttttttttagatggagtcttgctctgtcgccaggctggagtgcactggtgcgatagctcactgcaacctccacctcccaggctcaagtgatcctcccacctcagtctcccgagtagctgggttacaggtgtgcaccaccacatctggctaatttttgtatttttagtagagacagggtttcaccatgttgcccagtctggtctcgaactcctgagctcaagcaatcctcccgactctacttcccaatgtgctgggattataggcatgagccactgcacttggtcatctaagtcttattgcttatctccagcacctatcaacttagaatatgcttgctaaatgaataaatatgtgaattaaagaataagtgggctgggcatggtggctcacacttgtaatcccagcactttgggaggctgggtcaggtggatcatgaggtcaggagttcaagaccagcctgaccaacatggtgaaaccctgtctgtactaaaaatacaaaaaattagctgggcgtggtagtgggcacctgtaatcccagctacttgggaggctgtggcagagaattgcctgcatcagggaggtggaggttgcagtgagccgagatcgtgccactgcattccagcctgggagacagagtgagtccgtctcaaaaaaaaaaaaaaaatgaaaatagagttggctttgagtggagagaaatcaaggaggaccacccagaggaggtattcaaaaccttccagttaaaatttgcccaccagctttgccatataatgtggaatcagagagtgtgatgtctccagctttgttcattttgcttgagatggctttggctatttggggtctctatcaatggataaatggataaagaaaatgtgtgtatatatatacacacacacacacacacacacacacacacacacacacacgatgaatactatacagccttaaagaagaaggaaatactgtcatttttgaccacacggacgaacctgggggacattgtgcgaagtgaaataagccaggcacagtgagacaaatactgtgcgatttcgcttaactgtggtatctgaaaagatcaaattggtcgggcgaggtggctcacgcctgtaatcccagcacttcgcgaggccaaggcgggaggatcacttgaggtcgggagtttgagaccagcctggccaacatggcgaaaccccgtctctatgaaaattacaaaaaaaaaaaattagctgggtgtgttatcgtacctgtgatcccagttacttgggaggctgaggcatgagaattgcttgaactgggagacagaggttgcagtgagccatgatcacgccactgcactccagcctggtgagagagcaagactacatctcaaaaataaataagtaaaataaaaaggttaaactcatggaattagagagtagaatgatggttaccagggctggggaagtgggaagactgaagagagttagttggtcaaaggacacatgttttagttagcaggaataagttctagtgatctattgtaactataggtcaaaataatgtattacatatttcttttttttttttttgagacagagtctcgctctgtcacccaggctgaagtgcagtggcccgatcacagttcactgaaacctccgcctcgcaggttcaagcgattctcccgcctcagcctgctgagtagctgggattacaggtacacgccactacacccagctaatttttggatttttagtagagacgggggtttcaccatgttggtcaggctggtcttgaactcctgacctcaggtgatccacctgcctcggcctcccaaagtgctgggattacaggtatgagccaccatgcccggcccacatatttgaaaattgctaaaaagagtttattttacatagcgacgtcgctattaagaaaaaaaaaagtttattttaaatgctcttaccacacacacacacacacacacacacacacacacacacacacacgataagtaggtgagttgatggctatgttaattagcttcttaaataattccacaagatatacatacaaatatcaaaatatcagattgtaccccataaatagatacaattattatttgtcattaaactttttaaataaagaaaatttaaaaataaacaattgtccaccaggttcctctttctttttcttttcttttccattttttttttttttttttttttttgagacagggtctcactctgttcctcaggctggagtgcagtggtgcaatcatagctctctgcagcctcaaactcttgggcccaagcaatccacctgcctcagtctcctgagtaactgggactacaggcatgtaccaccgtgcccagctgatttatacttttttgttttgtagagactgggtctggatatgttgcccagggtttttgtttttttttatgtgggggtgggtgggtggggggtgaggaccgagccttgctctgacacccaggtttgagtatagtggtgtgatcttggctcactgcaacctccgcctcccgggttcaagtaattttcatgcctagcctcccaagtagctgggactacaggtgctcgccaccacacctggctaatttttttttttgtatttctaatagagacaaggtttcaccatgttggccaggctggtctcaaactcctgagttcaggtgatctgcctgccttagcctcccagagtattgggattacaggtgtgagttcggctccaggctggatcttgaattcctgggctcaagccatccttctgcctcagcctcccagaatgctgggattacaaagcttgagacagcaccttggccaccaggctcctcttttcttttttctttttttttttttttgagacggagtctcgctgtgtcacccaggctagagtgcagtggtgcgatctcggctcaccgcaacctctgtctcctgggttcaagcgattctcctgcctcagccacctgagtagctgggactatagccgcacaccaccaagcctggctaatttttgtattgttagtagagacggggtttcaccatgttgggcaggctggtcttgaactcctgacctcgtggtctgcccaccttggcctctcaaagtgctgggattacagatgtgaggcactgctcctggccaggttcctcttttcaaaggcagctcccgggggcacggctgacttgtgtctggtaactttttttttttttaaggaaaaccatctagttttttgggaaaaccagactcagagctcagaggatctgagcagagatttaggctcctgggtcctccagctccttgaacccacggggaatccagcagcggttgctcccttcccccctaaggaatgcaggaaccctgcccagaagtggcattagtaactgagctctccctttgtccctaagctgccattccattgtcttcccccagtgatcacggaaaaggtcctggagggtggaggagaggtgctcagaatggaggaggaggaggggtgttgggactgctcagctcctgctgaagtaaacacctgctctgtgttccataagctgggaccccagggtcaggccaaagggaaatggataccccgggtttgggtggtcgccacaaattctaatgcatgtactacctacatcatagccgcccccccaccaaataagcccagtgattaagcgtacagtttctggagcctggtgccagagtttgaaacctcctttttttttttttttggagacaaggtcttactctgtcgcccaggctggagtgcagtggcacgatctcggctcactgcaacctccacctcccaggttcaagcgattctcctgcctcagcctccctagtagctgggattacaggcaccccccactgtgcccacctaatttttgtatttttagtagagacggggttttaccatgttggccaggctggtcttgaacttctgacctcaggtgatccacccgcctcagcctcccaaagtgctaggattacaggcttcaaccaccacgcccggcctaattttttttttttttttttttgagacagtttcgctcttgtcacccaggttagactgcaatggcacagtctcggctcacctcaaactccacctcccagattcaagcgattctcctgcctcagcctccggagtagctgggattacaggcgtgcaccacgacgcccagataatttttgtatttttagtagagacggggtttcaccatgttggtcagactggtcttgaactcccgacctcaggtgaccagccctccttggcctcccaaagtgctgggattacaggcgtgagccaccacacccggccctctttaaagttctaaaatgcttctaacctttaagctgtccttgttcattcctgggcttaggccaaactaactttgggaaggaattcagctgatggtttgactctgaaacaaaactgataacagccctttccctaaaagacccacttcttgcctgggaaccagtctgcctttgcaggactaacaaattagctacaagattagaaattacagtttaggagtcatgcagcctctgggtccaagagtctgaacgtccccagattgctcccagaggtagcatcactattgtaaaacctaaaatcagtgcttgagatagtttgcagaccctgcactcgatggatcagctgacaccacccagaccatcagaccagaccagtcaagatcgcaccattgcactccagcctgggcaacaagagtgaaaccccatctcagaaaaaaaaaaaaaaaaaaaaaaaaaaaaaaagaaggaaaagaaagaaactctacacttcctgtccttattcctgggaatttatttaacaatttaatttctcaccatacccgagggaaggcacagcctattgcaaagtcattttgcacgaaagcaaactggggctcagagaaccaggcctccagtcagtgctggtgtcatggacaaccaggctgagggcccatggcagaacctgttttatgacatggctgctctccctgaagccagtgaggcacaaagcctaggggagtggacaagggacaggaaggtgtgggtttccatcctgctgtgtgaccttggggaagtcacctaacctctctgagcctcatttttctttcttttttcttatttatttattttgagacagagtctcgctctgtcgcccaggccagagtgcagtggcgcaatctcagctcactgcaagctccgtctcccaggttcaagtgattctcctgcctcagcctcccgagtagctgggattacaagcgcgtgccaccacgcctggctaatttttgtatttttaatacagatggggtttctccatattggtcaggatggtctcgaactcctgacctcgtgatttgcccacctcagcttcccaaagtgctgggattacaggcatgagccaccgtgcccagccttcttgtttttagtttttttttttttaatgaaaaaaaaagtattattatggccgggcacggtggctcacgcccgtaatcccagcactttgggaggccaaggtgggtggatcacctgaggttaggagttggagaccagcctgaccaacatggcaaaacctcatctctactataaatacaaaaattagctgggcatggtgtcgcatgtgtgtaatcccacctacttgggaggctgaggcaggagaatcgcttgaacccgggaggcagaggttgcagtgagctgagattgtgccactgcaccccagcctgggcaacagagagagactctgtctcaaaaacaaaacaaaacaaaacaaaaaccagaagagatgtgtggtgcatgtaaaatacacatgagatgagattttgaagactgattttgaaaaaaagaatgtaaaatgtcttggccataactttcatcagaattacttgatttgtatttaaatatcatggcatttagtttatgggggatttttttgttttaatttatcttttttctttttttccagcaaatgcttaacatccaaagtttatggttatatgtttgagatgggatctcattctgtcgcccaggctggggtgcagtggctcactgcagcctctacctcctgggttcaagccatcctcccacctcagcctcccaagtagctgggactatataggtatgtgccatcacgtttgactaatttttaaatttttttgtagaagccgggtgcagtggcaaatgcctgtaatcccagcactttgggaggccgaggcgggcggatcacctgaggtcaggagtttgagaccagcctggccgacatggtgaaactccgtctctaccaaaaatacaaaattagctgggggtggtggcgcgcgcctgtaatcccagctacttgggaggctgagacaggaaaatctcttgaacctgggagacagagattgcaatgagccaagattgtgccactgcactccagcctggacgacaaagtgagactctgtctaaaaaaaaaaaaaaaaaaaagttttctgtagacaccgaatctcactatatatgttccccaggatgaacttgaagtcctgggctcaagtgatcctcccatctcagcctcccaaagtgctgggattacaggtgtgagccaccgcgcccgacccatagatgcttgttaagggaaaatcccagcactttaggaggccaaggagggtggatcacctgaagtcaggagttcgagaccagcctggccaatatggtgaaaccccatctctacaaaaaatacaaaaattagctgggctttttggctggtgcttgcaatccttgagaggctgaggcaggagaatcacttgcctgtagtcttagctacttgggaggctgaggtgggaggatttgcttgaacccaggagttcaaggctgcagtcagctatgatagcgccactgtacttcaacctgggcaacagagggagacctggtcccttaaaaaaaaaaagacatttctcaagagggccttctaccttccttccttccctttgaaaaacctaggagggagttacagatgttattgttcaccagctgtatcctaaggaattcaggttcgtcctaaaggaaaatgccttttcccctttcctcacctcgttttagatactctctggaggattttcctcagattctcgctgaaacctgactctctcctggtaatgcaaatattcctgggctctctatgggaaagctgcggccctgtgcctgaccccagggcactgggagagaaagtctttccgggccgcaaggtgtcataggaaaggggtcccaatccaaaccccaagagagggctcttggatctcaggcaagtctgtaaagtgaaagcaagtttttaggaaagtaaaggaataaaagaatggctactccatagacagagcagccccaagggctgctggttgcccatttttatggttatttcttgataatatgctaaagaaggggaggattattcatgcctcacctttttagagcatctggggtaacttcctggtgtcgccatggcatctgtaaactgtcatggtgttactggtagaaggtgtccaggttcttggcatcccaaacaaagaattggacaaaacacaccaacaaagcaaaagcaaggaaggcagaagcagggattttttttttttttttttttttttgagacggagtcttcctctgtcatccaggctggagtgcaatggtgcaatcttggctcaccgcaacctccgcctcccgggttcaagtgattctcgtgcctcagccttccgagcagctgagattataggcatgcacccccatgcccggctaattttgtatttttttttagtagagtcggggtttctccatgttggttaggctggtctcgaactcccaacctcaggtgaactcccgacctcaggtgatccggctgcctcggcctcccaaagtgctgggattacaggtgtgagccaccgcgccccagccagaggcagggatttattgagaatgaaagcacactccacagtgtgggagtgggctggagcataggggctcaaagtccccattacagaatttttcggagtttaaataccctttacttggggtacgccctatgtaaatggagaggatgaagtaaggttacagtcattgacttggcttccgcccttcctgccataggtgaagtgtgaatcgaccttatattcttggcctccagaccttgttttcctgactcagtgacactgatgggagtgtagcagtgaggacaaccagaggtcactattggggccatcttggttttggtgggttttgactggcttctttttgcaacctgttttatcagcaaggtctttatgacctgcatcttgtgctgacctcctatctcatcctgtgacttagaatgccttaattgtctgggaacacagcccagcaggtcttggccttattttacccagcccctacacaagatggagtcactctggtttaaacatctctgacaaaggcattcagagagaaagtctgtccatgtgaacattgtctcctaagcttgccgggtgctccaatcacggccatgggcaggacgtgtgacagctggtctccccctccaagactcccagactagcaggcaaatctaacattccagaaacccttaaatagttcatgaatgacacctgaaatctgcattctgctgggggaggcagggacgtgtcttggccgtggctgggaagcaagatttttaaagctcaggcctgagctggaagaaaagactggaggaagaggggaggggatgggcaggattccaactctcctgggggagttccaggctggggcaacaccggttttactttctgaagcggagggaggtctctgtccatctcctgctgacacccaccccacctgggcctggctgctacccgagggtaattatctgcacccagccatgcaccgcaccgccgttcccactgcccatgactcactcggccccccttgcgttctttgttcttcgcctccttcccccacctccctgcaggcttcacactttgcaggcctaggtcttagtcatctctgggaacggctccaattttcttacaatgataagtaaatggatcattctttagctcggctagaatgtccccatctttattctcagagcaattccttgcacatagccgcatgccctcatcatagggattttgccctggctgccaccttgccctccttctggttccctgtttcattttcgaaggtctttcttctttgagacaaggtctcactctgcccctaggtgaagggcagtgatgcgatcatagtttactgtagcctccaactcctgggcccaatcgatcctccaaccttggcctcctgagtagctgggactgtaggcacccggctaatttttaaaaattattttcagagacagggtcttggccgggtgcggtggctcatgcctgtaatctctgtactttaggaggccgaggtgggtggatcacctgaggtccggagttccagaccagcctggccaaaatggtgaaaccccgtctatattaaaaatacaaaaaaattagccaggcgtagtggtgcacgcttgtagtctcagctactcaggagactgacgcaggagaatcacttgaacccaggaggtggaggttgcagtgagccgaaattatgccattgcactccagcctgggcgacaagaacaaaactccatctcaaaaacaaaacaaacaaacaaacaaaaaaactcaaaagagacaggttcttgctgtgttgcccaggctggtctcgaactcctgacctcaagtgatcctactgcattggcctcccaaaatgctgagatgacagtcgtgagccaccacacctggcctcgttttgaaggtcttgaatcaaataattaccttttccttgaggtatctggaatatatagataacataaccggttaggtcaggggtcgatctttaaccaggcccagggtgcggtgccgggctgtctgcctatggatttgatttctgccatttagtttttacttcttctttctttggaggcagaaattgggcataatatgaggggtggtgtcctcccttactatgattgtgcccctgcactccagcctggtcaacacagcaagaccctgtctcaaaaagaaaagggatctaacatctttttaaatttacttatttattctacctgtagactcttaacactagaatgtcagggatttttgcatgttggttcattcactgatccgttgtattctcagacctggggcttgtcaagcatgcaggcactgaatgaacatctgttaaggaaatgccgagtgagccaagcatggaatttgtaaggctcttgtgtcgtttcgaaccccgagagcaagccaacaaacaacatgagctggtgtggagcaacacgctgttttaatgtgcacctgggtgcagacggctgaggcctaaaatggcgtcagccccaagtgaggacggggcaggggttttatagtctcccgtaaacagcaagtgtcccagtctgacgtaactgctacatggtacccggatggcccgtctcttgatcttcaggggcatgtgtcttccggccagggtagatgtcttccagccagggtacgtgtcttccggccagggcaggtgtcttccggccaaggtagctgtcttccggccagggtagatgtcttccggccagggtagatgtcttccggccagggtaggtgtcttccggccagggtagatgtcttccggccagggtagatgtcttccggccagggtacgtgtcttccggccagggtacatgtcttccggccatctctcttcctgcttctgctatcttgctggcgcatgctgctggggcaagtagccttgcaccttgggactgggcctgagaagggaggagttattcatccccccaagtttatcctcccaagttttcaggccgcggggagaatctttcagaattattctgtcaatattgtttcttcccccttaccctggctctcttctcccaatcctgccctggtccccactctgcagatgagtagacactgtgtcccaccttgtcctgtgggtgcctgatacttgactctgtcagtgcttgtggctgctgtagttttatttattttcgagacagagtctcactctgtcacccaggttggagtgcagtggcgctatctcggctcaccgcaacctctgcctcccaggttcaagcgattcttctgcctcaacctcccgagtagctgggattatctaggcgtgcaccaccatgcccagctattgtatttttagtagagacagggtttcaccatgttggccaggctggtatcaaactcctgacctcaggtgatccccccacctcggcctaccaaagtgctgggattacaggtgcgagccactgtgcctggcttgtagtttaatttttatttatttatttatttatttatttatttatttttggagatgaagtcttgctctgtcacccagtctggagtgcagtggcacaatctcggctcactgcaacccccacctctcaggttcaagcgattcccctgcctcagcctcccaagtagctgggattacaggcgtgcaccatcatgcctggttaatttttgtatttttagtagagatggggtttcgccatgttggccaagctggtcttgaactcctggccttaagtgatctgcctgccttggcctcccaaactgctgggattacaggcgtgagccactgcaccaggccaattaacttctcctaatctgtaactaaggtctgagtcctgaagaccttcctctgagcctcagtaaatttacttaatctagatgggtccaggtgccagggatagttacccttatcttgtctcctgctaaattttagagtctagagagtttcttcagactcccaataaaacttgtttaatcctaaacaggtccattaagaattccttcattatcttgtcatgcttcaaggcccaggaaaggcctgggcaaaactcttggtgtgcttttgttacgttccagcctttgtctaagggcactggcgctatcatctttaaatatttaacttaaccacgcagtcagtgctgaaacagttgttagagaggcctgtgttagtgagacctggcctgtcacagtatctctctgtctctctttccctccctctctctttttcttgcataactgcagtatctctctgtctctgtctctctctgtagcgctccctctgtctctctctttcatttttcttttctttttatttatttatttatttattttttgagacggagttttgctcttgttgcccaggctggagtgcaatggtgtgatctcggctcactacaatctccacctcccgggttcaagcaattctcctgcctcagcctcccaaatagctggcattacagtcacacaccaccatacctggctaattttttttttttttttttttttttgagatggagtctcgctctgtcgcccaggctggagtgtagtggcgcaatctcggctcactgcaacctccacctcccaggttcaagtgattctcctgcctcagcctgccgagtagctgggattacaggcgtgcaccaccatgtccagctaatttttgtatttttagtagggacagggtttcaccatgttggtcaggctggtctcgaactcctgacctcttgaactgcccgcctcggcctcccaaagtgctgggattacaggtttgagccaccacgcctggactaatttttgtatttttagtagagacggggtttcgtcatgttggccaggctggtcttgaacgcctgacttcaggtgatccacctgcctcagactcccaaagtgctgggattacaggcgtgaaccaccaggtccggtcttctctctctctttttcttgcataacttcagtatctctctgtggacaacagaaaccagatggccccagtcctgggttaggtgggaagatattcaccgagcccaggggctggggtgggaaatttggaaaacgtaaggccactttcaaccctttcccagtgtgccttaacttgggaagcccctgggctataggcttctggctccccagtggcaaaaggcactgaggtcaggtggggaaagggaccaggattaagcaaaatgtctgtgctaggcgggagatgctgtctgtgaaaagtgcccgagggactggagcacctgagacgtcctcgctgcgtgtttcttctgccctcgtgtgtctccattgggaactgcagtaacccaagtctaggtttttgttgttttttgagatggagtctctctctgccgcccaggctggagtgcaatggtgtgatcttggctcattgcaacctccacctcctgggttcaagcgattcgcctgcctcaacctgccgagtagctgggattacaggtgcccgccaccacgcctggtgaatttctgtatttttagtagagatggagttttgccatgttggccaggctggtcccaaactgctgacctcaggtaatctgcccgcctcggcctcccaaagtgctgggattacagatgtgagccaccacacccggccttaagtttattattattattattattttagacagcatcttgctctgtcacccaggctggagtacagtggtgcaattatggctcattgtagcctggacctcccggcctctgctgatcctctttcctcagcctcccaggtagttgagactacaggtgtacaccaccaggcctggctactttttttttcttttttggtagagatgggatctcactatgttgcccaggctggtcttaacctcctgggctcaagcaatctacccacctctgctgggcatggtggctcatgcctgtagagccagcactttaggaaacctttatttcttaacacagagcaagttggagatgtttttgtttggctgacagaatcttaagagatttattggtgcctgaggcatttctcatttcacaggggagggaggggtctaaataaatgcttcagctcaagctggatacagagggagggattttcccaaatttctagcagcccccaggttgtaataacttcccaagtctctggcaattccagccttctgtcaattagcactgtaatcacctgcgtgcctatggcaagagagtttagggaacttgcaagaagagagagctgtagtttcgctttcccatggtttctggttactccaaaaaggccctgaccagaatcatggactctccatggcaaactctcatcttattttatatttatttgtttatttatttatttttttatttttgagatggagttttgttcttgttgcccaggctggagcgcgatggcatgatcttggctcatcacaacctccacctcccgggttcaagcagttttcctgcctcagcctcccgagtagctgggactataagcatgcaccaccatgccctgctaattttgtatttttagtagagacggggtttccccatgttggtcatggctggtctcgaactcccaacctcaggtgatccacctgcctcggcctcccaaactgctgggattacaggcgtgagccactgcacctggcctattttattttttatgtattttattttttgagatggagtctcgctctgttgcccaggctggagtgtagtgacgtgatcttggctcaccgcaacctctgcctcctaggttcaagcgattctcctgcctcagcctcccgagtagctgggactacaggtgtgcaccaccatgtctggctgatttttttgtatttttagtagagacgaggtttcaccatcttggccaggctgctcttgaactcctgacctcgtgatccagccgcctcagcctcccaaagtgctgggattacaggcatgagccattgcgcccaggcttactttatttttttagtttaattttttttttttgagacaagggtcttgctatgttgcccaggctggagcacagtgtttattcacaagcacaatcattgcacactacagccttgaacttggtctcaagcaatcctcccaacttccaattatcttaaattctgtttttgtctttgtttttgaaatggagtctctctctgtagcccaggctggagtgcagtggtgggatcttggctccctgcaacccccgcctcccgggttcaagtgattctcctgcctcagcctcccaagtaagtgggattataggtgcgcaccacctcgcctggcaaatttttgtatttttagtagagaccgggtttcaccaccttggccaggctggtctgaaactcctgatctcaggtgatccgcctgcctctgcctcccaaagtgctgggattacaggtgtgagccaccgtgccacctggccattctttttttttttttttttgccagagtcctgctctgtcacccaagctggagtgtggtggcaccatctcagctcactgcaatcttcgactcccgggttcaagtgattctcttgcctcagcctccgaagtaactgggattacagatgcccaccaccacacccagttaatttttgtattttagtagagatgcggttttaccatgttggccagtctggtctctaactcccgatctcaaatgatccacctgccttggcctcccaaagttctgggattgcaggcatgagccaccatccccggtcaaattctgtgtttcattcaccagaatagtcaccagaaagcagattttcttcgtctttccaacctgtgtacttacttatagaaatctacagcagggccacatctggaggtctgtttgttcacctgagaaattaaaatttaattctcttggaagaaaagtaacacaaataaatcagaggtttgattattcaaagccattctgcttaatatcatgtcagcttgaggccgggcactgtggctcatggctgcttttgcttttgctttgttggtgtgttttgtccaattctttgtttgggaatccaagaacctgaacaccttctaccagtaacaccatgacagtttacagatgccatggcgacatcaggaagttaccccagatgctctaaaaaggtgaggcatgaataatcctccccttgtttagcatatcatcaagaaataaccatgaaaatgggcaaccagcagccctcggggcttctctgtctatggagtagtcattcttttattcctttgctttcctaaaaacttgttttcactttgtggacttgcctgagatccaagagccctctcttgggatttggattggacccctttcctgtaacaccttggggtcaggaaaggctttctctcccagtgccttggggtcaggcacagggccacagcttccccatagagagcccaggaatgtttgcattatcagggataagagatggccttgcttccggtttgaaggctcaccagcatcttggggatggtgttggtggccagacagaaatcaatcagggacaggttggccaggaagaagtacatgggggtgtggaagtgggagtctatgctgatggccaggatgatgagcaggttccccaggactgtaccaggtacatgcagaggaacagagaaaagagaagtgtttcctgctccggcttttctgacagtcccaggaggatgaattgagatgcactggtttggtttcctggttccatgggtgtgattcctctggaagtatggaaaggggaggttataggaatgccagggagatggttttggaaggttagatgaactctaacctttaattttaacctttaactttagagaccctgtctctaaaatataaatattatatatgctataatatatatattatttttcagagacaagatcttgctctgtcacccaggatggagtgcagtggtgcaatcatagctcattgcaaccttgaactcctggactcaagccatcctcctgccacagcctctctagtagcagggtctacagtcacacatcaccatgcctggcctatttatcttcttttttgggggtggagagagggttttgctatcttgtccaggctggccttgaactcctgggctcaagcgatcctcccatctaggacttccgaagctctgcgattgcaggtgtgagccaccacacttggcctgacaacagcttatatataggttgcaccttgaaccatggatgaaatgtttacagcaactcatcttcttctttttttattaattaaaaaattttaggttggacgtggtggctcacggctgtaatcccagcactttgggaggccaaggcgggcggatcatttgaggtcaggagtttgagaccagcctggccaacatggcaaaaccctgtctctactgaaaatacaaaaattagctgggcgtggtggcaggcgcctgtaatttcagctacttgggaggcagagacaggaggattacttgaacccaggaggcagaggttgcactgagctgagatcatgccattgcactccagcctgggcaacaagagtgaaactccatctcaaaaaaataaaaaagtaatataaccattaatattgatgctactgtcaactgttgactctccaaacaaacccagcaagtgcttgtaagccaaaaataaccacccccatccatctgaagggacccctcctcttggccaaaggcattctaaagttaacctgaaaagctgcttcaggactgtgtgtggtggctcatgcctgtaaacccagcactatggtagatgggcgaatcactagaggccaggagttcaagaccagactctccaacatagtgaaatcctgtctctactaaaaatacaaaaacattagctgcgcgtggtggcatacacaggtaatcctagctacctaggaggctgaggcacgtgaattgcttgaacccaggaggcagaggttgcagtgagccaagatcgtgccattgcactccagcctgggcgacaagagtgaaactccgtctcaaagaaaaaaaaatgttaaaagaagtaatttatagagaagaatataatagaggtcagaaactcagatctacgtaaataaaggaaaagcattaaagaagtaataggtaaaagagaaacaagagcttttggctgggtgtggtggctgacacctgtaattccagcacttcagaatttttatcatgaaaggtttttatttcatgagtgtttattgagtgagcacattaccccataatctgggcattgcctcataaaaccaaatttctaaaaatttaggaggctgaggcagaagaatcccttggggccaagagtttgagaccagcctaggaaacctagcgagaccccatctctataaaacattaaaaattttttaaaaattagccaggattgatggcacacacctgtagtcccagttactcaggaggctgaagagggaggattatgtaagcccaggaattggaggctgcagtgggttatgaccagaccactgcactctaccctgggtgacagaatgacaccctgttcaaaaataagaaaggaaaacagaaaaacctatagattaaaaggacttaaaacagtaatcaaccaactgcaatctatggacattatatgaattctgatgtaaaaaactaaaaatatatgaggcaatttgggtaatttgaataataattgggtatttgaaaatgttatataattattattaatattttgaatcaaaataattgctaggcgcagtggctcacatcggtaatcccagcactttgggaggctgaggtgggtggatcgcttgaggtcaggagtccaagactagcctggccaacatggtgaaatcctgtctctactaaaaatacaacttgggagcctccctactcaggaggctgaggcaggagaatcgcttgaacccgggaggcggaggttgcggtgagccaagattgcaccactctactccagcctggatcacagagcgagactccatctcaaaataataataataataatggtattgtggttatgctttcaaaaagagctttttgttttttgaagacataccaaaatcattatacatatggaatttgctctgaaattatctctgggaagagagaggtcaaagtaggtaggacacagattcaacagaggcttgacttggtaggtgtggaagctgagtgattgggcacacaggatttcattatatgaagctgaggcataccaaaaaaaaaaatgccagttttgttgatcaaaaatggtagaatattgacaattgcatatggctcaacctagtattttgctctttacatagctaaaggctttgaaaaactgagccttcatgtatccatcagtttcatgagtgtttactgagtagacacaacccaataatctgggcatgaccttataaaaccaaattcctgaaaattcccagtaatgccaccatggtcccaatactcagtgagaatctggctgcagacttagtcagccaaccactctctccatgtacatccattagggtaggctctagtttctccttttgcagaactgaatgaaagccatgatccctttatagagagttgttctgttgaggttgagtgatgaaagcaggcagccctgggtcttggtgacagatcactgggtggacgtgggaaaatgtttggagtgtttcttagttcttttctttttttttttttttttttttttgagatggagtttcgctcttgttgcccaggctggagtacaatggtgcaatctcggctcaccacaacctctgcctcctgggttcaagcgattcttctgcctcagcctcctgagtagctgggactacaggtgtgcaccaccatgccaactaatttttgtatttttagtagagacagtgtttcaccatgttggccaggattgtctcaatctcttgacctcatgatccacccgcctcagcctcccaaagtgctgggattacaggcgtgagccatcacacccggccatttcttaattctttaagtgatgaggaacattggcttccaataagaatggaaccttctgatataagaagccctgggcattggaaagactgagtttagaagacagggagagtttgttcctggaagagagggtgcagagaaagttaggaatcatgcaacttacccctaagttgcctcatgaagacataaaatgcttcttactgccacgtcccagcccccataggaaacagaactattcagggactagagatgaaattggacaatttgtgtaacaaggagcttggggaattgacttcttattggcccagaaattgtaaatattccctcggttcctacaacttatcccccaccctagcttttcttctttggaccaggaggacaacttcccagtatttctatgtagcatctgctggcccaaacatctaacttcatcatctagtacctgctgggaggacactgagccagtttaactcatgcctgggtgatggtgtcaagaagaggaaagatagcccagtgagtgagctgagagagagagagagagagagagactgaacgaatgttggtaaaattaatgaagccaagctcaatgatctcagatacactggaagattcttttttattatttattgatttactgatttatttattttagagacagaaccttgctctgttattcaggctggagtgcagtggcacaatcacagctcactgcagcttctacctcctgggcttaagcaatcctcctgcctcagcctctagagtagctggaactacaggcatgtgccaccacacccagctgattttttgaacatttttcccccaccgagatggagttttgctcttgttgcccaggctggagtgcaatggcacgatcttggctcactgcaacctctgactcccaggttcgagcaattctcctacctcagcctcccgagtagctgggattacaggcatacaccaccatgccttgtgaattttgtatttttagtagagacaaggtttcaccatgttggtcaggctgatctcgaacacctgacctcaggtgatcacccgcctcagcctccgaaagtactggaattcactgtgctcggccgacactggaagattctgtctggtcaatcagcacccacttgtcagcccagaatccaatggctcttcttaccaaactagctcagcctggtttagttgtgatgctaccagtcctttacctaaaaaccatgattatttgtagcactgtttttcttcgtaactagactttttttttgaaatggagtcttactctgtcacccaggctgcagtgcagtggcatgatcttggctcactgcaacctccatctctcaggttcaagagattctcctgcctcagcctcccaagtagctggaattacagatgcccgccaccacacccagctaatttttgtatttttagtggagctggggtttcaccataatggccacgctggtctccaactcttgacctcaggtgatccacccgcctcagcctcccaaagttctggtattacaagcatgagccactgcgcccagcctggactttcttttccaagcccacttgagtgcctgaaggaacagatggcttcctcctcagtacttctgtaggcagaagtttgtgttattccccatgttgggtcttggaagcccttggagattcccaagtattccaggctgagagatcttagacacagagtgcagaggtccagataggataggactggtgcttccttggagagaggctcatcaagaagcttaagggatgaatcttcgggttcctgatacttaaatttttcccaagagctgtggaagaatgaggagtgacagagtaattcagtgaaagcttaggtgtcagggcaggaggatgtctgagatcagttccttgattccattagtagtttaatcacagagcattcactggcttccttgagatggaaaaatactctgactcggccaggcacggtggctcacacctgtaatcccagcactttggaaggccgaggcgggcggatcacctgtggtcaggagttcaagaccagcctggccagcatggtgaaaccccatctctagtaaacatacaaaaaaattagccaggtgtggtggtgggtgcctgtaatcccagctactcgggaggctgaggccagagaaccatttatatccgggaggcagaggttgcagtgagctgagattgcaccattgcactcctgcctgagcaacaagagcgaaactctgtctcaaaaaaaaaaaaaatactctgactccttttaaaatgttttaattgtatatatttatgaggtacatagtaatgtttccatatatgtaatgtatagtgatcagatctgggtaattagcacatctattatcacaaacatttatcatttctctgtgttgggaacactcaatatcctccttctagctgtttagctatatagcatattattgttaactgtattcatcctacagggatatagaacactagaacttattcttccaatttgcctgtagttctgtatgctgtaacaaatctcttcctatctgccccctccctctacccttcccagactctagtatcctctgttctttttacttctatgaaatcattttttttcttttagctttcacatgtgagtgagaacatgcagtgtttaactttctgttcctggcttatttcatttataatatgctccaattctttccatgttgctgtaaatgacaagatctccttcatttttatggctgaatagttttccattgtgtatttctaccacatttttttttttttttttttgagacagagtttcgctcttgtcaccccggctggagtgcaatggcacaatctcagctcactgcaacctccgcctcctgggttcaagcgattctcctgcctcagcctcccaagtagccaggattacaggggcccaccactacgcccggataattttttgtatttttagtagagacggggtttcaccatgtcggccaggctggtctcgaactcctgacctcaggcaatccgcctgtctcagcctcccaaagtgctgggattacaggtgtgagccactgtgccctgcctaaagccaacacattttccaaaaatccctggctgcctcaacagttttcggagtgctcttacaatcctcaggggtgctgtgtgtggggtgtgattctctattaatccaagctcctcataatctgataaatgctgcctggagttcatctccctcactaaactgtgaattcatgaatccatgcgtgcttcatgaattacagagattaagagtacatgctctagatttagaatgcttgggctaatccagccacctgctctcagttaaaccccatttgattgtattaatcttctgtgcttccatttcttcctgcatgaaatagcactaacattattctgttgtcgtgagtagcaaattagcagagaccttcgatcagtgcctggcaatacaggataaccatcactgattcatgcgtatatggaacaattatgtttatgtcttctgtatcccagacaagatgctggtcacaaaaatgaacaaagacaaacaattcctgatttcaaatgtcttgaggacagggtctgtgtattttcatatatttgtccccacaactcaggccagatcctgtcactatatattgcaattaccaataattttttacaaaatgaatgaacgaatgcgtgagtgaataaaagtgacatctgcaaggtgttcattagaaatcacaaaaataaaaaataaaaatataaaagtaacatgatcagaactgtaatgcaggaagattaatttagtgacttcaggattgtttcttttttttgagatggagtttcgctcttgctgcccaggcaggagtgcagtggcgcaatcggggctcactgcaacctctgcctcagcctcctgagtagctgggtttacaggcatgcgccaccatgcccggctaattttgtatttttagtagagacgggttttctccatgttggtcaggctagacttgaactcccgacctcaggtgatccgcctgcctcggcctcccaaagtgctaggatgacaggcatgagccaccgcgcccggccgacttcaggattgtttcaaaggaagataattggatgcatgaggctagcttaagattagtgaacttggcaactcagaagtaataagagcctttcatttagggtgtctggaaagaggagatgactggaaatgactataaaaataaaaagttcaggacgggcgcggtggctcatgcctgtaatcccagcactttgagaggccaaggcgggcagatcacgaggtcaggagatcaagaccatcctggctaacatggtgaaaccccgtctctactaaaaagtacaaaaaattagccaggcgtggtggtgggcgcctgtagtcccagctactcgggagtctgaggcaggagaatggcgtgaacctgggaggcggagcttgcagtgagccgagatcgtgccaccgcactccagcccgagtgacagagcgagactctgtctcaaaaaaaacaaatagataaaataaaaaatggaaagttcaggctgggagcaatggtttacacccataatcccggcactttgggaggccaagtgtgggcggatcacctgatgtcaggcgttcgagaccagcctggccaacaaggttaaaccccatttctttttttttttttaaatagtatttgcaccacaggtgctattgtttattttaattccaattaatcaagaattgccacacatgctaagaataaagctgttggatgtgaactaaggagcacgttgctattttattttagtgtccagatactcagctgggttaaaccccatttctactaaaaatacaaaagtgagctgggcatggtggcgtgctcctgtaatcccagctacttgggagggtgaggcaggagaattgcttgagcctgggaagcagagattacagtgagccaagatcgtgccactgcactccagcctaggcaacagagcaagaccccgtctcaaaaggaaaaaaaaaaacaaaggaaggaagttcgacttgtagaggatgtaacactcattgatggattgcctttgacggtggaggtagaaaggaggaagactgaaaatttcaaacacaggtatctggaaggatggtgattccattcatggacatagtggctccgggagaaaatagactttatttttttatatgttgagtttgccatgtcaggaagaaagaaaagagggaaagaatgctttgtataaccctattattattgttgttgttattgagatgtagtcttgctctgtcaccaggctggagtaccgtggtgtgatcttggctcactgcaacctctgctccaagggtcaagcaatcttcccacctcagcctcccgagtacttggaactataggtgtccaccatcatgcctggctttttttttttttttttttttttttttggtagagaaggggttttgccatgttgctcaggctgctcttgaacacctgcattcaagctctctgcccacctcgccctcccaaagtgctgtgattacagatgggacccatcgtgcctggccctaacattttttaattaatcaaaaaagaagaagagttgctataaatacttcatccatggtttaaagtgcaacctatatataagctgttgtcaggccaagtgcggtagctcacacctgcaattgtagcactttggaaggcctagatgggaggatcactcaagctcaggaattcaagaccagcctggacaacatagcaagatcctgtctccaccacacacaagaaaagataaataagccaggcttacttatggtgtgtgcctgtagaccccgctactagagaggctgtggcaggaggctggcttgagcccaggagttcaaggttgcaatgaactatgattgcaccactgcactccctcctgggtgacacagcaagaccctgtctctaaaaaataatatctttagcctggcgtggtggctcacgcctgtaatcccagcactttgggaggccgaggtgggcggatcacgaggtcaggagttcgagaccagcctggccaatatggtgaaaccccatttctactaaaagtacaaaaaattagccggacgtggtggtgggcacctgtagtcccagctactcatgaggctgaggcaggagaatcacttgaacccaggaggcagaggttgcagtgagcagagattgcacgactgtactccaacctgggtgacaaagcaagactctgtctcaaaaatatatatatatgtatatatacataatatgtaataatatatataatatttctattttagagacagggtctctaaagttacaacaccgtacatgtgtggaatatatttacatatattctctctctctctctctctatatatatatatatacacacacacatatatattctatatatacacacacacacacacacacacacacacacatatatatatatacacatctggtctcataattagcccaaatgagaactgggatgtgatcgcatctaactttccaaaaccatctccctgtcattcctataacctcccctttccatacttccagaggaatcacacccatggaaccaagaaaccaaaccagtgcatctcaattcatcctcctgggactctcagaaaagccagagcaggagacgcttctcttttccctgttcttctgcatgtacctggtcatggtcgtggggaacctgctcatcatcctggccatcagcatagactcccacctccacacccccatgtacttcttcctggccaacctgtccctggttgatttctgtctggccaccaacaccatccctaagatgctggtgagccttcaaaccgggagcaaggccatctcttatccctgctgcctgatccagatgtacttcttccatttctttggcatcgtggacagcgtcataatcgccatgatggcttatgaccggttcgtggccatctgccacccattgcactacgccaagatcatgagcctacgcctctgtcgcctgctggtcggcgccctctgggcgttttcctgcttcatctcactcactcacatcctcctgatggcccgtctcgttttctgcggcagccatgaggtgcctcactacttctgcgacctcactcccatcctccgactttcgtgcacggacacctctgtgaataggatcttcatcctcattgtggcagggatggtgatagccacgccctttgtctgcatcctggcctcctatgctcgcatccttgtggccatcatgaaggtcccctctgcaggcggcaggaagaaagccttctccacctgcagctcccacctgtctgtggttgctctcttctatgggaccaccattggcgtctatctgtgtccctcctcggtcctcaccactgtgaaggagaaagcttctgcggtgatgtacacagcagtcacccccatgctgaatcccttcatctacagcttgaggaacagagacctgaaaggggctctcaggaagctggtcaacagaaagatcacctcatcttcctgaccaccaggactcaggaacttctggggggtagaatatatacatctgggagtcttgggctaacatctggaattgcatgagttgaagagtaggcactttgaattttattattattattattatttagagatggggtctcactatgttgcccgtgctggagtgcagtggcgtgatcatagatcactgcagcttcaaacttctctctctgtgtgcattgttttactagagacagggtctcactaatttggccaggctggtctggaactcctgggctcaagcagtacttccccctcagcctcctaacatcctaggattacaggtgtgagctaccacgccgagcctcactttgaattttttgtttgtttttgttttttgagacagagtctcgttctgttgcccaggctggagtgcagtggcatgatcacggctcattgcagccttgacctccctggctgaagcaatcctcccacctcagccttccgagtagctaggaccataggcacataccaccatgctcagctaatttttgtatcttttgtacagacagggttttgccatactacccagccgcagaagtttcacgggaagtctcaggatggtctggtaactgtttttctttttgttttcttttttgtttttgagacagagtctcattctgtcacccaggctggagtgcaatggcatgatctctgctcactgcaacctccgcctctgggttcaagtgatcctcctgcctcaccctccagactagctggaactacaggcacccatcaccatacccggctaatttttgtatttttggtggagacagggttttaccatgtgggccaggctgttctcgacctcctgacctcaaatgatccacccaccttggcctcccaaagtgctgggattacaggcgtgagccaccaagcctggctggaaaggccatttgaggacacagcgaaagggggtctatctgccacggaagaaagacttcaccaaaaaccaatcccaacggcacgtcgatcttgggcttctgaccctcagaaccatgagacaatccacttcacttatttagccacgcagtctgcggtgttttgttataaccagccctggccgaataacacagtgactgtgaggggaggagtcttaggaagatgtcaacacgtgaaggagtgaaatgccgccatgtggttctgtggctggaccgactctgtctccaaactccgttaggaaagataatcattctggggctctgttgcccaggctggagtgcagcggcatgattatagctcactgcagtcttgacctcctgggctcaagcagtcctcccacctcagcctcccaagtagttgggaccagaggcatgcagcaccatgcccggctaatttatttttatttgtatatatttttttggtagagatggggtctcactatgttgtccaggctgctctcaaactcctgagctcaagccatcctcccatctcagcctctcaaaatgctgggattacaggtgtgagccaccacacctggccaaaattttttttttttttttttgagacagagtctcactctgttgcccaggctggagtgtagtggcactatctcagctcactgcaacctccacctcctgggttcatgcaattctccgcctcagcctccccagtagctgggactacaggagcgcaccaccacacccagctagtttttttgtatttttagtagagacgggatttcaccatgttggccaggctggtcttgaactcctgacctcaggtgatccacctgccttggcctcccaaaatgttgggattacagacatcagccaccacgcctggcccaatcattgtttttaccccttgtctttatatgagtcactaataaagcagaagtgtcccgggtgctgtggcttacacctgtaatcccagcactttgggaggccaaggcaggcagatcacctgaggtcaggagttcaagaccagcctggccaacatggcaaaaccccatctctactaaaaatataaaaattagtcaggtgtggtggggcgtgcctgtaatcccagctactcgggaggctgaggcaggagaatcacttgaacctgggaggcggaggttgcagtgggccgagatggcaccactgcaacctgcacttcagcctaagggatggagcgagactgtctcaaaataaataaataaataaataaataagttgaagtgtctcaagttgatataatgtggatgtttctctcctccagatcttatgttgaaatgtgatccccagtgtcggaggtgaggcctaggcagaggtgtttgattatgggggcagattcatcatgaagaatttagtgccctccccatagtaatgaggaagttcttgctctactacttcacaaagaccctggcactcctcccctctctctcttcctctctcaccatttgacttgccagctccccttgcccttccaccgtgattggaagcttcctgaggtctgcaccagaagtagatgatggcaccacccttcttgtacagtctgcagaactgtgagacaaataaacctcttttctttataaattacccagactctaggctgggctcagtggctcacgcctataatcccagcactttgggaggctgaggcaggcagatcacctgaggtcaggagctcaaaagcagtctggccaacatggtgaaaccctgtctctaccaaaaatacaaaaattagctgggcgtggtggcgcactcctgtaatcccagcttctggagaggctgaggcaggagaatcacttgaacccagggggcagaggttgcagtgagctgagactgcaccactgcactcctgcctgggcgacaagagcgacactctgtctcaaaataaataaataaataaataacccagactcaggtattccttgtagcaacacaaacactgatatagaagtcttcctaaatacgtaaataaatatgataatgctaacttaaaaaaatttttttttgagaaggagtttcactgtgtcacccaggctggagtgcaatggcgccatcttggctcattgcaacctccacctccccggttcaagtgattctcctgcctcagcctcccgagtagctgggattacaggtgtgtgccaccacgcccagctacttttttgtatttttagtacagacagcatttcaccatgttgcccaggctggtctcgcactcctgacctcaggtgatccacccgcctcggcctcccaaagtgctgggattgcaggtgtgagccactgcgcctggccgataatgctaactttataggggagcaaatagagcttggaacagtgaaataaagtgtcaacaattatacggttatttacaaagcacaggtgggattcaaagccagttggtctgattccaaattctcacccttaaccatgatgatcttctcttgtatttgaagaccttaatcaggttttccggatcattcattatgaatttctcttttgtatatttcacagcttaaagtccgaagtagctggcatgttagtggaatgatgacactctagaaatgggtttctgagaggtgagatccacagggagaaaaggccggtgcagtggctcatgcctgtaatcctggcactttggaagctgaggcgagtggactgcacgagctcaggagtttgagactaccctgtgcaacatagtgaaaccccctctctacaaaaaatacaaaaattagccagatgtggtggtgtgaacctgtagtctcagctactccagaggctgaggtgagaggatgcgtcacctgagcctggggtggttgaggctgcagtgagccatgatcacaccactgcactctagcctgggcaacagagtgagatcctgctaaaaaaaaacaaaacaaaaaaacaacaacaaaaaaaaaacacacacacacataaattgcctagtaggaaactctcatccttgtttattttatttatttatttatttatttattttgagacaaagtcttgctctgtcgccaggctggagtgcagtggcaagatctcagctcactgcaacctccgcttcccaggttcaagcgattctcctgcctcagcctccggagtagctgggactacaggtatgtgccaccatgcccggctaatttttgtatttttaatagagacagggtttcaccatgttggccaggctggtcttgagctcctgacctcaggtgatccgcctgcctcagcctcccaaagtgctgggatttcaggcatgagccacagcgcccggcctcatcttccttctgtactggattcaacacctctttctctacatacctttaaaggtgtcctcactttagcaaacaatatcagaaagattaatactacatttcagcttaaaaataaaattaattcataaggatgtgtgtatttttaaaaattttacattcctgcataagaatatgtggtattactttctcttgcattcaaattgtctctttcattctgagaatgccaccagatgatgaaaagcatgacaacttttttttttttagatggagtcttgctgtgttgcccaggctggagtgcagtggtatgatcttagctcattgcaaacctccgtctcccgggttcaaacgattcttctgcctcagcctcccagcctgggtgagagtaagacccttctcaaaaaaaaataaaaaaggaaacaacaatcagggcacaaaattcgttcatgaagtttcaacttttacaatgtcaaaaagaataaaatttgattaataaattgtctagggctataaacaacatgcatattaaaaggacagatttgtagggcaaaaatgtacaagactgtcaatcaaatactaattaataaaaaaatcactaatcaaatacagcatcaataaaattcctgtctccatggttacattacttcttccttttctttgtgtttcctccacttctgtctttttttttcttttttttttttttttgtttgagactgaatctcactctgttgcccaggctggagtgcaatggtgcaatcatagctcactgcagtctccaactcctgggctcaagcgatcctcccatttcagcctctcaagtaattgggactacaggtacacaccactgtgccaagctaatttttaaaattttttgtaacagggtctgattttgttgcccagctgggttcaaactcctggcctcaagcaattctcttgcctcagcctcccaacgtgttggaattacaaggatgaaccactgcgcctggcctccacctctgcctatcttataagaaaacatgtggttacatttagagcctgcccaggtaatccagggtaagctgcttctctgcaaagacccttttcccaaataagtcacattcacccttttgtcatatgatttaaggccaggtgcggtggctcacgtctgtaatcccagcattttgggaggctgaggcaattgtatcacttgagtccagaagttcaagaccagcctggccaacatggcaaaaacccatctctactaaaaatataaaaattagcaggctgtggtggcaggcacctgtaatcccagctactcaggaggcagaggaaggaggatctcttgaacccgggaagcggaggttgcagtgagccgagatcacgccactgcactccagcctgggcgacagggcaagactccagctcagatagatagataaataaataaataaataaataaataaataaataaataaaagctcagattcacaagcgagaggattaaaatgtggatatagtcttctgagggccatgagccaactcatgacagaaatgtcttctggttgactccatgaaagttatctattatcaatggacccagggaagggttctccattttctgtctctgggaatcaggtctagatatgtctcttgcattgactgcaactacctgttgcagtcagaggaaaaccagtgctggggggagggaacctcgtgaaggactgaatgaagccctctcctattcgtgcacattccttaattctgaggtccttgtaatgaaagagaactgtctttactgtttgagcatattagagttaggggtgctatttatttatttatttatttatttattttttgagtcttgctctgtctcccaggctggagtgcagtggtgcaatctcggctcactgcaacctccgcctcgcgggctcaagcaattctcctgcctcagcctcccgagtagctgggattacaggctccagctaccacacatggctaacttttgtatttttagtagagatggggtttcaccacgtgggccaggccagttttgaactcctgacctcaagtgatccacccaccttggcctcccaaagtgctgggattacaggtgtgagccactgtgcccagcccagggctcctattctttaaactggaacctaaggtatcctcacttatgaagttcaaatatctcacaataatctcaaatcactaagataatctaatcatgctaattttttgatgataaaactgagtataatagatgctaatgttgtctagggagaatatagtttaccagtgactggtcccagtagttactaaattgggtatgaaaacttagctcccttgacccactgtaggtctacactggggtgcaattgacaagaccctaaatacgcaataaggtggaagcttgtctccagatataacaacaacctcgcttaaatccttttcctggcagcgcacagtgacttcaccactaatctcagatctttgggaggccatggcaggaggatcacttgaacctaggttttgagaccaacctgggcaacatagccagagtccatctctacaccacaccccacactggacgtggtggtgcatgcctggagtcctagcttcctaggaggctgaggtaggagggtccctggagtttgagccctggagtcctggagtttggggctgcagggagctatgatcatgtcattgcattccagcctaggtgacaaagcaagaccctgtctatggaaaaaaagaaacaaaaaacaaaactgcccagctacttgggagcctgaggtaggagaatcgcttgaacccagaaggcggaggttgcagttagccgagattgcgccattgcactccagcctggtggacagagcaagactccgtctcagcaaaacaaaaaacaaaaaacctaaactaaacaaaaaaccaaaaatacattttcctgacctatcctcctgaactatctaccttccacaacttttcttcttctgagactaatccattaaaaaaaaatcacttagccaggagcggtggctcacgcctctaatcccagtaatcccagaactttgggaggccgaggcgaatggatcacaaggtcaggagatcgagaccaccctggccagcatgatgaaacctcacctctactaaaagtacaaaaattagccgggtgtggtgtcgtgcacctgtagtcccagctactcagtaggctgaggcgggagaatcgcttgaacctgggaggcagagattacagtgagccgagatcacaccactgcactccagcctggccgacagagcgagactctgtctctaaataaataaataaataacttgggctcagcctctgagtctatggcctgagcaaagaaattgagtctagagaattaaaatcacatgtccatcatcacagatccagacataaaaagcaaagtcagatttcaagccggagtggaaatgtagttggcttttatgtcatctagacattttagaagaacttggtgatgaaagagtcaggcaggctgggcgcattgtctcacgcctgtaatcccagcactttgggaggccgaggcgggtggatcacctgacgtcaggagtttgagaccagcctggccaacatggtgaaactctatctctactaaaaatacaaaaattagccaggcatggtggcaggcgcctgtaatccccactactcaggaggctgaggcaggaggatggcttgaacccggaggcggaagttgcagtgagccgaggtcgtgccattgcactccagcctgggagacagagaaagactccatctcagagaaaaaaacaaaacaaaacaaagagtcaggcattctagctcaccaggaatcctgtcactttgacttactctagaaacctgaatccaaagcaaatggcacaccacagaagagaaggtatcctccctatgaacttcctcaaggttcctttcatgtccttattcctcagactatagataaaggggttcaccatttgagggaacacagaatacatcactgaagccactgcagtcttcctaggtgagtcagtaaccacagaactaatgtacacccccaaacctgccccatagaacaagagaacaatggagaggtgagacccacaggtggaaactgctttgtgctttccacttgctgatggcattctcaaaacacaggaggtgatctgagtgtaagacaaaatgattccagacagaggaacaccaccaaatatgcaagctgcaaaatatatcaggatgttattgatgagggtgtctgaacaggtgagttggatgacctgagccagttcacagaagaagagcgggatttccaggtctgtgcagaaggacagcctcaacaccatcaggctgagaagaagggcattcacaacactagtcaacagagagagaagaatcagcaggccacagaggcgggggttcatgatgactgtgtatctaagggggtgacaaatggccacatagcggtcataggccattgctgcaaggagacaattttccaagccagcaaaaaacaagacaaagcagatctgggtgaggcagcctgagtacgtgatgctccgattctgagcttggatgttcaccagcatctttgggatcgtggttgtgcttaaacaaatgtccaaaaaggagagattggagaggaagaagtacatgggggtgtggaggtgagagtcagagatgacagccaagaggatgagcaggttccccaggatggtgaccaagtacatggacaggaacaggctgaaaaggacgggctgcagttccggatcctctatcagtcccaggagaaggaattttgaaatagctgtttggtttctcgcttccatgctgttgatgatgaatctgatggaaaagataataaaatctgtaagcagcagctgcatcggcatcactcgagaacatgacagaaacgcaaaatcttgctcccctccccagacttcttgctgataaactctggggatgagaaccgacagtttattctttcacaagccttgtagatgtttttgatagatgctgaattttgagaaacagttcaaaacatttacttaggaatggagttttcttaatcaaaaaatgtggaaatctttttttttttttttttttttttgagacagggtctcactctgtccaccaggctggaatgcagtggtgtaatcttagcttattgcaagctccacctccatgttcaagtgattctctggcctcagcctcccaagtagctgtggttacaggtgcacaccaccattcctggctaattttgtgtgtgtgtgtgtgtgtttttagtagagacggcgggggtgggggtctcaccatgttggtcaggctgatctcgaactcctgacctcaagtgatccacctgcctcagcctcccaaagtgctgggattacaggcttgagccaccatgcctggcccaggagtggagttttcttaatcaaaaaatgtggaaatgttttttttttttttttttcgggagatagggtctcactctgtcgcccaggctggagtgcagtggtgtgatcttagctcactgcaagctccacctcccaggttcaagtgagtctccttcctcagcctctcaagtagctagggttacaggtgcacagcaccatatttggctaattaaaaaaaaattttttttttcgtatgtttagtagagacagggtctcaccatgtaggtcaggctggtctcgaactcctgacttcaagtgatccgcctgcctcaggctcccgaagtcctgggattacaggtgtgagccatcacgctcggccaaagaatgtggaaatcttttatctttattctttctgctgttcccttacccatggcagacacttctagtctagtctagtgctctttcctgctaagaccacatgtacctttgggattcttatcagcatagagctccaaacagcgctagagatagacagaaagtcagagttagcatgctaaatattacctatttgtcatctttcacatgtgattttctaagacaatcatccaattttcaatgttacccaaaacaaatgaatatagaaacatactgcaacattgctaacattttgtcagtttgtgtcattcttaaacttttaaaaatgataaaacttgacatttaaaaaattttaaaattcttggtggggcgtggtggctcatgcttgtaatcccagcactttgggaggccgaggcgggcagatcacggggtcaggcaatcgagaccatcctggctaacacggtgaaaccccatgtctactaaaaatacaaaaaattatcggggcgtggtggtgggcgcctgtggtcccagctactcgggaggctgaggcaggagaatggcgtgaacccaggaggcagagcttgcagtgagccgagatcgcgccactgcactccagcctgggcaacagagcgagactccatctcaaaaaacaaacaaacaaatttttaaattctctagtgtgcactgtgaacccaagtgaatattcaaatccttccccttgcttactttcttcctacatttcttttctctctcctcctgttccctccattttcttttctttttttctttttctttttctttttttcgagatggagtcttgctctgtcacccaggttagaatacagtggcgcgatctcggctccctgcaacctccgcctcccgggttcaagctattttcctgcctcgtcctccaaagtagctgggattacaggcgccagccaccgcacccggctaatttttgtatttttagtagagacgggtttcactatcttagccagactggtctggaactcctgaccttgtgatccacctgcctcggcctcccaaagtgctgggattacaggtgtgagccactgcgcctggcctctccattttctttattgaaacaaattattataagacactaactcaatttcatttcttcttctacgtgctgagaataaaacaaggtataaaacatgattatccacatcaaaaaacttatccaccactatcaaatagactttaatccctctgatgcaagattggttcaacatacagaaatcaataaatgtgattcatcacataaaaagaactaaacccaaaaaccacattattatctcaatagatgcaaaaaaggcttttaataaaattcaacattgctttatgttaaaaaccctcaacaggctgtgcgtggtggttcacgcctgtaatcccagcactttgggaggctaaggcaggcggatcatgaggtcaggagttcgagaccagcctagccaacatggtgaaaccccatgtctattaaaattacaaatattagccaggcatggtggcatgcacctgcaatcccagctacttgggaggctgaggcaggagaatctcttgaacccaggaaatggaggttgcagtgtgccaagattgtgccattgcactccagcctgggtgacagagtgacactctgtcttaaaaaaaaaaaaagtttagcttgttttttaacaactgatgtatgattcacaaaaaaaagagagaagggaagagaaagagagagaaaaagaaaaggagaaagaaaggaagaaaggaagaaaatttttgtatgataaacagtgtacagtgtgagaaaaattctaaacgtttttgaacctgcacagatatattcatttttattatagattattcatgtgtgaattattcagaaagtacggagaataatgaagggctggctacccatcagtcaacgatataagattcacacaaggccaggcgtggtggctcaagcctataatcccagcactttgggaggctgaggcaggtggatcacctgagatcaagagtttgagatcagcctggccaatatggcgaaaccccgtctttactacaaatacaaaaaaattagctgggtgtggtggtgtggtgcacgcctgtaaccccagctacttgggaggctgaggcaggagaatcgcttgcacctgagaggcagaggttgcagtaagccgagatcgtgccactgcactccagcctgggtgacagagggagactgtgtctcaaaaaaaaaaaaaaaaattcacacaattcaccatccttgattagatatttttattgcaaaaagtaaaaaatatttttattgcaataaagtgtgtatttgaggctgggcatggtggctcatgcctgtaatcccagcattttgggaggctgaggcaggtggatcatctgaggtcaggagttcaagaccagctgaccaatatggtgaaactccgtctctacaggagaatcgcttgaacctgggaggcggaggttgcagtgagccgagatcatgccactgcactccagcctgggtgacagagcaagattccatctcaaaaaaaaaaaaaaaaaagtgcatatttcaaaaccaccgcttcatgtttttgattttttttcccttccctaggggaaccagtacacacacttgatctatattattcttctatacctttcattatatttgatattattcttccaaataataacaatggcattgtgttgcattttaaaagctttatatagccaggcactgtggctcacatctataatccgggtcctttgggaggctgaggcgggagtacaagaggccaggagtgtaagaccagcctgggcaacgtagtgagaacctgtgtctacaaaaaaaatttaaaaatttgcaaagtgtaatggcatgcacctgtagtcccagttactcagtaggctgaggctgaaggattggttgatccaggaattcaagactgcagtgagctatgatcgagtcaccacactccttccaggcaacagagtgagaccttgtctctaaaaaaaccccaaaaaacaaaaccacctgccctcatttccaaagcattaattaactaaaggactttgggttaactgattggcttcaacaaaaatgatgctcaacaactcacatggatattgcagaggatgatctatcctcaggaagtgcagacagactcgagtcctggtcaaaaatatcatgtctggaaggaggttctgatgcagcttccgagctgggtaagagatgttcagtgaggtgcttacagcctgacttgttgcactgtctatatccctgggacctcaatatccaacgctcctcattacactggctattttaccatcgttctgatcccaggagtgcacatccttaaagaccaagactagaggagtgaggaattcgggatggctgagtccctgtcccctgaggccacgtgtacaccatccatatctctccattgtttctgctcacctccacttcacgaatcttgctcccagaacacataccattcgtctagtaaaaaaaaggattttgatctgaagaatgtgagttctcttcattgtcagacccggaaagacattaaaatgagacagaaaccacacccctcctcccctcctttgaactatgcattcatctcataaaactgcttgctgttgccacaagtagctataaattaacctaataatagcatatgaattaaaaagaaattatttaggcagttagtgagggtacagaagtcctgggtaaggtttttctttttaataaaaagcagcccccaaatcatttcttttcaggcaaaaagtagcctgaaaaatcaagctgcaagcataggtaagcaagctgaaagcctgcgtaggtgaatgccagcagctgtgccagaagacaggtataaccaacatgaaggttttcttttttcttctttctttctttcttattcttttttttttttttttttttttttttttgagacagtctcactctatcacccaggccggaatgcagtggcgccatctcagctcactgcaacctctgcctctgggttcaagtgattcttgtgcctcagcctccagagtagctgggattacaggcgagtgccaccacacctggctaatttttgtatttttagtagagatgagatttgatgctgggcgtggtggcttatgcatgtaatcccagcactttgggaggctgaggtgggtggataacctgaggtcaggagtttgagaccagcctggccaatatggtgaaaccttgtctgtactaaaaatacaaaaattagccaggcgtggtgacaggcacctgtagtcccagctactcgggaggctgaggcaggagaatcgcttgaacccaggaggtggaggttgcagtgagctgagatcgtgtccctacactccagcctgggtgacagagcaagactccatctcaaaaaaaaaaacaaaaacaaaaacaaaaaacccttaacctgtaagccatctgcaagtttgggtcttacatgtaaactagctgggcacagtggctcacgcctgtaatcccagcactttgggaggctgaggcaggcggatcacgaggtcaagagttcaagaccacaatgaccaacatggtgaaactccgtctctactaaaaatacaaaaattagccagccgaggtggcgcacacctgtaatcccagctattcaggaggctgagacaggagaatcgcttgaacccagaaggcagaggttgcagtgagctcagattgtgccactacactccagcctgggcgacagagcaagactccatcttaaaaaaaaaaaatgtgtaagctgccccaattttccttgcttcgttacctgtcttttaaggttcttcaatctctgaccacacaggtagtatctggcaagcaacagtattcaacctgagatttcaagatgttatgtccattatgccagtaataataatctgtgttcccccagttgatctgtcaatctaaaataatcaaaagggtcagaatctagtttgttttattatttttagagacaggatctggctctgttgccccggctggagtgcagtggtgcaatcatagctcactgcagcctcaacttcttgagcccaagcgatcctcccacttcagcctcccatgtagctgggactacagatgtgcaccaacacgtctgagtaattttttattttttttttcagagagatgggggtctctctatgttgcccaagctggctttgaactcctgggctcaagcgattttcccacctcggcctctcaaagtgctggtattacaagagccaccacacccagccagaatctagtctaaagacagtttattcaagcacgatgtctgagacaagtcaccagggaagcacagcttccaaagaagggaagtgagtgtttcaaggtgcaaaagtttgagattgtttatgtaggcaaaattcagggaagtttaacagaatttcttttttctattttttttttttttttttttgagacacagtcttgctctgttgcccagggctggagtgcagtggtgtgatctcagctcactgcagcctccgccttccaggttcaagtgattctcgtgcctcagcctcctgagtagctgggattacaggcacctgccaccacgtccggctaatttttgtatttttagtagagatggggttttgccatgttggtcaggctggtctcaaactcctgacctcaagtgatccacctgcctctgcctcctaaagccctgggattacaggtgtgaactactgcatgaagcccagtttaacagaatttcaacatctttaaggcttaatgcatagttacaatatttggtattattcttctaaacagtaacaattgcattgtgttgcattttaatgcaactgattagtctgggtggttttttcttttagggaaggtgtatttaacattttacaatgatgacataacagtcgtggggtcctgtgtaccatctggtctgagttaggtacaggacagtaaaggaggcagttaatctataacaaaggtcagtgactggaagcagggagatctggtctctggtctctcccagtgctttatagaacaagaaccacaaagaagagccattatggaaaacagtatagaggttcctcagaaaactaaaaatggaattacgatgtgatccactaatcccaccatggagaatgtctccaaatgactgaaactaggattcacgacagaaaaatcaactggacacagaacaaggcagtaatcgaggaaacagaaaactgaaacgtataaaacacatagaacacagcaatggcagaattaagtctctcctaatcagcaatcatgttaaaaaataaaaggattggccgggtgcggttgctcacacctgcaatcccagcactttgggagattgaagtgggtgaatcataaggtcaggagatcgagaccaatctggctaacatgatgaaaccccgtctctactaaaaatacaaaaattagccaggcgtggtggcatgcacctgtaatcccagctactcgggaagctgaggcaggagaattgcttgaaccctggaggccgaggttgcagtgagctgagatcacaccactgcactccagcctgggtgatagaatgagactaaaaaaaaaaaaaaaaagataaaggattaaactatccaaacaaaaggcagtatttgtcagcataaatactaaaaattgattcaactatatttagaagagacttgttttagactcgagacaaaacagggtaacagtaagagtatggatagacagatgtatttcatgcaaatagtatgcagatgacagctgcggaggctgcactaatatcagaagacagaataaagtcaaaaccattaaatcagtcaaaggaggacatatatatacatatactcttcctgcttttttgtggttatgaaataagcgatgtcactaccttgctaacttttcttttctcctgtcttatttcacactcaatatcttcttctctaactaaagtacttctccatggtagaactgtccttgtaaagaaacattcgaaaggttttcatgacagccccaaggcagcagtgagtcctctaacacggcaatgatagaattacttttattcaatgatgattctttttctttctttctttctttctttctttctttctttctttctttcttcctttctttccttctttctttccttctttctttcttcctttctttctttccttttctttctttctctctctctttctttctttcttgtctttttttttttttaatttattttttgagacggagtctcgctctgttgccaggttggagtgcagtggcactatcttggctcaccacaacctcagcttcccgagcagctgggaccacaaggtgcccgctaccatgcccagctaatttttaaatttttagtagagatggggtttcaccatgttggccaggctgatctcgatctcctgacctcaggtgatccccctgccttggcctctcaaagtgctgggattacaggcgtgagtcaccgtgcccagccaagtaagatttttcttttggtctccaaaggagatgggttagaatcatagcaagggaagatgactgagggggaaagcgagaacttagataacattcttacaaataaatcaatgggactgttctaaaccaagtaagatgtcaaaaaaagatgatcaacctttgtccttcctacctaataattatttattttattctacaattcaggtttaataagtggatgataaatgcaacaaggggaacaattctaatttctaaaacaagagggaaaaatatgtgagaacaatagcattataggatttatgattatagactggttatggaacacaatgattccacattattatactgaatacttaggaggtgctgggcattgaattaagtgtttgtagtgcttatcagagtggagttcccagccgggtgtggtggctcacgcctgtaatcccagcactttgggaagcagaggtgggcagatcacctgtggccaggagttcgagaccagcttggccaacttggggaaaccccatctctactaaaaaaaaaaaaaagaacaaaaattagctgggcatggtggcgcatgcctgtaatcccagctactcaggaggctgaagcaggagaatctcttgaaccagggaggcggaagttgcagtgagcctagattgcacctttgcactcctgcccaggtgacaggctccatctcaaaaacaaacaaaaaaacaaacaaccaaaaaaaccaccaaaaaacaccagagtggacttcccaataggaattatactttatatggtcagtctaaggctctcatactaatcatttccccctcaccaggaattagattaagaaaaaatatatgatctatctctctgtggtgagattaaaggtgatatcttttggattactctatgcaatcccatttatcaatagatctgggaagaagagtcagatttctgtctctgggcatcatgtctgggtattacgtctgtatttgctacagccatctgggtccatgaggggaaccagccctaaaagaaagccacagccgggcacggtggctcacgcctgtaatcccagcactttaggaggctgaggtgggcaaatcacttgaggtccggagttcaagagcaccctggccaacacggtgaaaccccatctctactgaaaatgcaaaacttagccaggtgtggtggtgtgcacctgtaatcccagctacttgggaggctgaggcaggagaatcacttgaacccaggaggcagaggttgcagtgagctgagattgtgccactgcacttcagcctgggtgacagagccaggctgtctaaaaaaaaaagaaagccaaaagaagaaggagtaagtgaattattctctacattccctacctctgatatatttgcaaagaaatgtagctctctttattatttgagtatattataatcaacatttctttcactaaagccgacttcttcactgatcaagatagaatatctcaccactaggccgggcacagtggctcacacctgtaatcctagcacttttgggaggctgaggtgggcggatccaaaggtcaggagtttgagactagcctcgctaatacggcaaaaccccatctctactaaaaatacaaagattagccaggtgtggtggcagctgtctgtagtcccagctactgaggaggctgaggcaggagaatagcttgaatctgggaggtggagtttgcagtgagctaagattgcaccgctgcactccagcctgggtgacaagagcgagactctgtctctcaaaaaaaaaaaaaaaaaaagaaagaaagaaagaaagaaaatctcaccactgaaataatctaatgatagcaattttattgatgataaaactgagggtagtaagtagacgttgatgttgacctgcacagacagtttagcagtgaccgggctctaaaattacagaattctggtatcaacaatcagctcccattttgcacaataggtttcactctggcatgcatttcatatggccctaaatattcaatcaggcagtatcaattctgtgttgcgaacacagccttctttggattcttgccctgacctgtgagacgcctcctgcttttcttcctctgagaatatttaccaaccaaatcactgtaacacttgccacaggttaactttttaaacaccgcatgcaaagaaactgagctttgagaatagaattcatttttgacacatgacagagctccaaaagaggcaagatttcaacaacaacaacaaaaaacacacacacacatccatgatgcagactagtcactttaagaaaatcttgaaaggtcgggcgcggtgactcacgcctgtaatcccagcactttgggaggccaaggtgggcagatcactaggtcaggagattgagaccatcctggccaacacggtgaaaccccatctctactaaaaaaatacaaaaaattagcctggcatggtggcgggcgcctgtagtcccagctactcaggaggctgaggcaggggaatggcgtgaacccaggaggcggaggttgcagtgagcggagatcgtgccactgcactccagcctgggtgacagagcgagactctgtcacaaaaaaaaaaaaaaagaaagaaagaaaaagaaaatcttcatgatgcaagagtcaggcactctggcttaccaaggaatcctgtcatgttgattccttttagaagcttcagttcaaagcagagcacaaagatcacaaaaaagaaagtaggtcaggcatagtggctcatgcctgtaatcccagcactttgggaggccgaggtgggtggattacctgaagtcaggagttcgagaccaccctggccaacctggtgaaaccccatctctactaaaaatacaaaaaaaatccaggtgtggtggtgtgtgcctgtaatcccagctactcgggaggccgaggcaggagaattgcatgaacccgggaggcggagtttgcagtgagccgagatcgtgccactgtactccagcctgggcgacagagcgagattctgcctcgaaaaaaaaaaaaaaaagtaaatctcgatgcaagagtcaggcactctggcttaccaaggaatcctgttatgatgatttattttagaagctccaattcaaagcagaggacaaagatcgctaaaaaggaaacagcctaccaataagtttcctcaaagctttcttcatctccttatttctcaggctgtagatgaaggggttcatcatttgagggaccacagtgtacatcactgaagccacagcagtaattcgggaagactcagcaacagcagaactaatgtacaccccaaaagctgtcccatagaacaaggaaaaaacagagaggtgacagccacaggtggaaaacgctttatactttcctcttgctgatggcattctcagaacagaggtgactatttgagaataagagaaaattattccagagagaggaattgcaccaaatacactacttgcaaaatatatgaggatgttgttgatgagggtgtcagaacaggcgagcttgatgacctgaacgacttcacagaagaacaaagggatttcaacgtttttgcagaaggacagctgcaataccatcagactctgaaccagggcatccatagtgctcatgaacatggagagaagaatcagcaagccccagaaatggacattcatgaggactgtgtacctcagtgggtggcaaatggccacatagcggtcgtaggccatgactgcaagaaagcaactttccaagccagcaaaaaccaagacaagacagatctgggtgaggcagcctgtgtaagtgatactctgattctgagcttggatgttcactaggatctttgggactgtggttgtggttaaacagatgtcagtaaaggagagattaaagagaaggaagtacatgggggtgtggaggtgggagtcagagatgacagccaggagaatgagcaggttccccaggatggtgaccaggtacatggacaggaacaggctgaaagggattaacttcagttctgggtcctctgtcactttcatgagaagaaattctgaaacagctgtttggtttctgggtcccatgtttttgatgatcaaaaaatgggataattagacaatcaaatgtgttttctagactgcgggagcaacgtcaacagaggcaaacaccatcttgaaaaggggtagattctaagggaagaaaataaataagtgttgccttttgtattgatattactttactgcttttacaaaacttgaagctaatacagcacagcatcaataattgttaattctggaaatggttaaggggtcatcattttttatttttatttatttattttttaaatttatttatttatttttgagacagagtcttgctctgtggccaggctggagtgcagtggcttgatcctggctcactgcaacctctgcctcctggtttcaagcaattctcctgcctgagcctcccaagtagctgggattaaagatgcttgccacaacacctggctaatttttgtatttttagtagagacggggttttgccatgttggccaggctgctctcaaatgcctggcctcaagtgatctgcccaacttggcttcccaaaatgctgggtttacaggcgtgagccaccacgcccagcctcatctttttttttttgagatggagtttcgctcttgttgcccaggctggagtgcagtggcacaaacttggttcactgcaacctccgcctcccaggttcaagcgattctccttcctcagcctcctgagtagctgggattacaggcatgtgccaccactctgctgttctgattattaaaaatatttggtaatgaaaaaacaaaaaataaataaaataaaacaaagtacataccaggaaaacggctggaagactctgtctggacccccagagacttcacgccagccaacagaaataatacaaagctgtgtcaagaaccaggaaaggagaatcgcttgaacccagggggcggaggttgcagtgagctgagatcatgccattatactccagcctgggcaacggagcaaaactccattaaaaaaaaaaaaaacaccacaggaaagtgaagataaggtgaagtttagcaagctgctcacctcctctcccccacaagactgcaagtaaattacagagaattttataacagtcatcctgttttcaaagaaaatggtaactacagaattcaggatagtgtatttgttgctggaagaaaacaaggtgatttgagtagaaaatcctacaggtaggttctatggtgatgacattaacttatttttaatgccagataggtatatgcggttttatcatgttactattctctcagaattacagatagatttttttttttttcctgagacagtgtctcgttctgtcgcccaggttggagtgcagtggcacgatctcggctcacagcaagctccgcctcccaggttcacgccattctcctgcctcagcctcctgagtagctgggactacagacgcccgccaccacggccggctaattttttgtatttttagtagagacgggtatcactgcgttagccaggatggtctccatatcctgaccttgtgatctgcccacctccgcctcccaaagtgctgggattacaggcgtgagccactgtgctctacactacctacagatagatagattttatgcattactttgtatatgataatgtaacaagtatgattaaagaaagacccttcatattctaaccctaaatatgttttctcatgttctcctaatattaaagttaggagtgtcaggcttcagaggttatcagcatctctccaagtgcttattaaaaattctcatacctcacacatttctcagagatttaacaccagtagttctcgggcaaggccaagaaccttctctatgaggaaaggtctcgggtggttcctctctgtgtctgttctgtggacaccaacagaggaatctcagtcctaggagactctatgagtgctagaataggagctgcgttccagatatgtaagagctttttgttttgttttgggggttttttagagacaggatcttgccatgttgcccaggctggtctcaaactcctggcctcaagcaatcctcacgcttcagcctcccaagtagctgggactacagccacgagccaccatgcctggcttcccagatattttggtgaaaataaagccagctcctcaagctccaaagacagctgcaacagaagactctccacccactcctttgattctcttttgacacctccattgtttgctcctcacacttagagagataattctgactgatgatcctgcgtgtgtgtgtgtgtgtgtgtgtgtgtgtgcttatagaaaaaaattatgccccaaaatcttgccaacttccattttctcctgtcttgtcttacactcgacatctccttctcaaatgaaagtatttctctacagagtaatcttcctagtgaagacacagtaaacagttttgcacgggagcactgagactacagctaatcctaaaattatacaattagaatatatttgtgtaatatacatataattatacatatagaggattatatatatatgtatatctccaggtgtggtggcactcactcatttgtagttccagctactcagggtcgctgaggcccaggagttcaaggctgcagtgagccatgatcgtggcactgcactccagcctgagtgacagagtgagaccctgtctctaataaacaagtaaataaaaataaaatttaaaaagaaaatttctattacaaatagactctcttcacagcagacctacagaaagaccgtcggttttctctgagcaccatgtctgaatatgatgcctacatttctgcagacatctgtttgcaagaggaaaatcagcacagacatggagccatcttcccgaggcttgcatgaatccccacactactgctcccatgcatttcttacccctgaagttcttgtcataaaaaataactctgtttcttattcatgtaaattatagtcagagtttctttctcttataagaaataaaagcttctggctgggcacagtggctcatgaatgcggtggtcactggtacattgtagtctctgcctccctagcggctcaattgccaaagctcctcattagccaaggaatttgtgttggcactgtaatcccagggtgcttaaatccttgcagaacaagggagaaattcaggatggctgctgtcctgaccctagaggccaagtgtacatcatccacttttctttttttctttctttttttttttttttgagatggagtcttgctctttcacccagcctggagtgcagtggcgcaatctcggctcactgcaacctctgcctcctgggttcaagcgattctcctgcctcagcctcccaagtagctgggattacaggcgcctgccaccactcccagctaatttttgtatttttagtagagatgggatttcaccatgtttgttaggctggtctggaactcctgacctcaggggatccacccacctctgcctcccaaagtgttgggattataggcatgagccaccatgcccagtctattttatttttttaatttttattttaattcaggggcacatatgcaagtttgtacataggcaaacttgtgtcatgggagtttgttgtaccaattatttcattacccaggtattgagcctggtacccattagttatttttcctgatccctgcctcctccagcccttcacccttcaataggccacagtgtatgtttttcccctctatgtgtccatatgttctcatcatttagctcccacttataagtgagaacacgtggtctttggttttctgttcctacactagtttgctaaggataatggcatccagctccatccattttcctgcaaagaacatgatctcattcttttttatggctgcatagtattctatggtgtgtatgtaccacattttctttatccattctatcagtgatgggcatttagattgattccatgtctttgctattgtgaatagtgctgcaatgaacataatgtgtgcttgtgtctttatagtacaatgattcatattcctttgggtacatacccagtaatgggattgctgggtctaatggtattctgtctttaggtctctgaggaattcccacactgccttccacaatggttgaactaatttacactcccactgacagtgtataagtgttcctttttctccacagccttgccagcatctgttattttttggctttttagtaatagccattctgattgatgtgagatgatatctcactgtggttttgatttgcatttccctaatgatcagtgatattgagcttttttttatatgattgttggccgcctatatgtcttcttttgaaaaatgtctgttcatgttctttgctcactttttaaatggtttttttttcttgtaaattggtttaagttccttaaagatgctggatattagaccttcatcagatggatagattgcaaaaattttctcccattctgtaggttgtttgttcactgtgatgatagtttctttcgctgtttagaagctctctagtttaattagatcccatttgccaatttttgcttttgttgcagttgcttttggtgtcttcatcatgaaatctttgctcgtgcctatgttctaaatggtattacctaggttgtcttctggggtatttatagttttgggttttacatttaagtctttaatctgtcttaagttaatttttgtatataatttaaggaaggggtacagtttcaatcttctgcatatggctagccagttatcccagcaccattgattgagtagggaatccttttcccattgcttgtttttgtcaggtttgtcaaagatcagatagttgaaggtgtgcggtcttatttctgggttctctattccgttccattggtctatttgtctgttcttgtacaagaaccatgctgttttgattactgtagccctgtagtgtagtttggagtcagatagtgtgatgcctccagctttgttccttttgcatagggttatcttggctattcaggatttttaaaaaacagttatttctagaaatcattttaaaagagagtaaaatctttttctggaggtgtgtaagctacttcagttgcttcttggatgtgagcctttggttgtagctattttttgataaattttctctgtttttttcttggttgttactggcactactattacatgaatatttatgattatgtcacactaaaatatgtctttgaaccagaaattaataaaagttttctcatcttattgctttatcacattgaaagtcacaaaaattagttttatttctatttctggttctccagcctgggcaacacagcaagattgtgtctctaaaaccaaaataaagaaaaaattgaaatgttcagagactcagaaagggaaaagtcatgaggcaagtgttcagataccaccttggggaaagtttgctgactctgtggaaagtgagcaggaaatgaagtagcgttaagggtagaatgtgttgtcccagggttgataagaaatgtggtggtggtcggcctggtgactcaggcctgtaatcccagcacgttgggaggccgaggcgggagaatctcttgatcccaggagttcgagatcaccctggccaacatggcgaaaccccgtctctactaaaaatagaaaaaaattagctgggcgtggtgatgcttgcctgtaatccttgttactccggagactgaagcatgagaattgcttgaacctaggaggcggaggctacagtgagccgagactgcaccactgcactccagcctgggtgacagaacagactctgtctcaaaaaaaaaaaaaaaagaaagaaagaaaaagaaaaagaaaaagagaaaaactgagcttggagaatggaactaatttttttttattatttatttttaatttttatttatttatttatttattttgagacggagtctcgctctgtcgcccaggctggagtgcagtgcggcatctcaggtcactgcaagctccgcctcctgggttcacgccattcacccgcttcagcctcccaagtagctgggactacgggtgcccgccaccacgcccggctaattttttgtattcttattcgagacggggtttcaccgtgttagccaggatggtctcgatctcctgacctcgtgatcctcccgcctcggcctcccaaagtgctgggattacagacgtgagccaccgcgcccggccgtggaactcgttttcgtacaatcacagagctacacacaaagaacaagtgatgtttcaaccccaagttaaaatgtacttacccactatgttatctaatcattttagaaaactcagtgatagatcagtcaggcattctggctcaccagtatttctgtgtctttgacccactttgaatcccaagtccaaagtggacaacataatcaggaagagaagttatcctaccaatgagtttccccgaggctctcttcatatctctgttcctcaggctgtagataaaggggttcataataggtgtgaccactgtgtacatcactgaagccaccgcagccctccttgaagagtcagaaacggcagagctaatgtacaccccccaacccgccctgtagaatcgggaaacaaatgggaggtgagactcacagctgaaaaaagctttattacttgctgacggcattctcaaaacagacaaggctatttgagaataagaaaacatgaccccagagagaagaatatcaccaaatatgcaagttgcaaaatagaccagaaagttatttttatttatttatttttattgtttttttttttttttttttgagtcggagtctccctctgtcacccaagctggagtgcagtggcatgatctcggctcactgcaacctccgcctcccaggttcaagtgattctcctgcctcagcctcctgagtagctgggactacaagcaagcgtcaccacacccggataatttttgtatttttagtagagacagtgtttcaccatgttgggcaggctggtcttgaactcctaacctcgtgatccacccgcctcggcctcccaaagtgctgggattacaggcatcagccaccgtgcctgactgcagtagccattattttattctgattttatgagatcagctcttttggattctacacatggttgagatcatgcagtatttgtctttctgtacctggcttatttcacttagcataatgttctccaggttcctccatgttgtggcgaatgacagaatttccttctttttaaagggtgcatagtactctatcatataccacattttctttttcttttccagacaaagtctcactctgttgcccaggctagagtgcagtggtgcgatctcggctcactgcaacctccgcctcctgggttcaagtgattctcctgcctcagcctcctgagtagctgggattacaggcatacgtcatcatgcctggctaatttttgtatttttagtggagacacggtttcaccatgttggccaggctagtcttgaactcctgacctcaagtaatctacctacctcaggctcccaaagtgctgggattacaggcgtgagccaccgtgcctgccataccacattttctttatccacttatatgttgatggacattcaggttgattacatttcctggctattgtgactaatactgcaatgaacatgagagtgcagatatctcttcagcatattgatttcaattcctttgaaattcaacagcacaaacataaatcaatataactatagatagtcaacctaaataacagaaagaggctatctaaaagaaaatgatgtttattgccaaagaaagcattgcaatagcgatacgcgtgccatcataaactatgtatgcattcaaggaggtaaaggaagacaaagttttttaatggaaaaatgaggaaggttacataattgttttgaaataattatccttcacagtaataactaataacaagggtgatgccagtctgaagctggacaggcagttgctgggcagatgtacttgcagaaatattttttgtgtaaggttgcaacagccttttgtgcaaggttgtggtttttgtcgtctcgtgatagtttttgtcgtctcgtgatagtttttgtagtcttgtgatagtttttgttattaggcatgcaagtgaaataaatctcttcatggccttccctagctttacttgtcaggatgtttttgtttttttcatttttgtttgtttgtttgtttttcatgagatggagtcttgctctgtcgcccaggctggaatgcagtggtgcgatcttggctcactgcaacctccgcctcccaggttcaagcgattctcatgcctcagcctcctgagtagctgggattacagatatgcgccacaacgtctggctaatttttgtatttttcatagagatggggtttcaccatgttggccaggctggtctcgaactcctgaccttgtgatccgcccacttcagcctatcaaagtgcagacttttttgatagccgctacacccagccttttttttttttaataagtgactccattttgattctgacaattttaacaatatatataccaagtacagtcagccttccatatctgccagtaccacattcatggactcaaccaactgtggatcaaaaatattaaaaatattaaagaaaattttaaaaatattaaataagaatattacaaaaatacaatattaagtaatacaactatttacataggattaacattatgctaggtaatataagtaatctagaaatgatttaaagtataggcgacctgggcacagtggctcacactgcttaatcccagcactttggaaggctgaggcagaaggattgtttgaggccaggagtttgaggctgcagtgagttataatcacaccactgtagttcaacctcggcaacagagcaaggctctctctaaaaaagaaattaatcatttaatattaaaattaaaaattaattacttgatttttaaattgtaaataaattacttaatttttaaattaaaaataaattagctagctgggcatggtggctcatgcctgtaatcccagcactttgggaggctgaggcgggcagattacctgaggtcaggagttcaaggcccgcctggccaacatggtgaaactctgtctctactaaaaatacaaaaatgagccaggcacagtagcaggcgcctgtaatcccagctattcaggaggctgaggcaggagaatcgcttgagccccagaggtggaggttgcagtaagccgaaattgagccactgcactctagactgggcgacagagcaagactctgtctcaataaataaataaataaataaataaataaataagtttttaaatttttaattaaatttaattttttttaaaaaaagacttagtattggatagaccagtagggtgactatagttcaaaataatccattgtatatttcaaaatacctagaagagaacaattggaatggttggagcataaagataagacaaatatttaaggtgatggatatctaaagtaacaaatccttgcagattatacaaatgtattacactatcacatgcatcctgaaacaatgtacatctcttatgcattgatacaaaaatttaaaaaaagccaggtgtggtggcatgcacctgcagtctcagctactcgtcaggctgagtccagaggatcgctttagcccaggaattcgaggcagcagtgagctgtgatcacaccactgcactccagcctgggcaacaaagtgagagactgtctcaaaaatcaattagtcagtcaatcaatccaaaaagaactcaagtccacgtggtccgattccaaaactatcaccctgaaccatctgatctctggtctcatgtattcaaagacattggtcaggtggggcacagtggctcatgcctgtaatcccagcactttgggaggctgagacgggcagatcacctgaggtcaggagttcgagaccatcctggccaatgtggtgaaaccccgtctctattaaaaatagaaaaattagctgggcttggtggcacgtgcctgtaatcccagctactccggaggctgaagcaggagaatcgcttgaacccaggaggcggaggttgcagtgagccaagattgcgtcactacactccagtctggtcaacagagcgagactccatctcaaaaaacaaacaaacaaacaaaaacaaaaacaaaaacagaaaaccccaaagacattagtcaggctttcaagacttctcattacttctttctccctgacatatcccagcagtgtaagcccaagaagctgagacatcaatggaaagatggtatcctagatattagtttcctcaaagccttcaacatgtccttgtttctcaggctgtaaatgagtgggttcagcatgggggtgaccacggtatacatcactgatgctattgcacccttcctggaggagtgggtagccccagaactaaggtacaccccaaaccctgttccataaaacaaggaaacaacgattaaatgtgacccgcagatggaaaaagctttatactttccaccagctgatggaattttcatgacagaggagacaattcgtgtgtaagagaaaatgatcccagagagaggaacaacacctaacaggctggtcaccaaatacaccaggatgttattgatgaggacatcagaacaggcgagcttgagaatatgagctagttcacagaaaaagtggggaatttccaggtctatgcagaaggtcagctgtagcaccatcaacgtgtgcagcagagcatccaggacactaacgatgaaggacagcagaagcagcagcccacagagtttggggttcatgatgacattgtacctcagtgggtgacagatggccacaaatcgatcataggccatcatgaccagaattccattttccaatccaacaaaaaccaggacaaagcagatttgggtgaggcagcctgtgtaattgatggattgagcctgtgcctggatgttcaccagcatcttgggcatcgtggtggaggtgaaacagatgtcgaccaaggacaggatagagaggaggaagtacatgggggtgtggaggtgggagtcagagttgacggccaggatgatgagcaggttccccagcattgtggccaggtacatggacaggaacagcatgaagaggatgggctgcagctccggatcccctgacaatcccaagagaaagaattctggagtgtctgagaagtttcctgctttcatgttgttgatgagtcttgatcttgtcaatattatcaaaaccaaaccagttataagttatagaccttttttccttccttccttccttctttctttctttcttccttccttccttcctttctttttctttctttctttctttctttctttctctctctccctctctctctttctctttctctctctttctttctttctctctctccctccgtctttctttctttctctttctttctttcttcttactttctttttctttccctccctccctctctccctcctctttctttttctctttctctttctttcttttctctttccttctttctttctttctcctttttctttctttcttcctttcctttctttctctttctttctctctctccctccctccttccctccctctctccctcctctttttctccttccttccttccctccttcccccctctctttctttctctctcttttccttccttccttcctttctctctctctctctctttctttccttccttccttccttcctcccttccttccctccttctttctttccttctttcttctttgcagggtctctctctctctgtcatccatgctggagtgcagtggcatgatcatagctcactgtagcctcatccccctgggctcaagcaatcctcctctctcagcctcccaaatagctgggatgacaggcatgaacccccatgcccagcctgttctttacttccttcctaggtaccctatcagtgtctttctcacccaccaatttccctttctcattacagtttgtgaaaataaaaattaagccctctttatctagcagcataagcccctcccactatttttatttgccttcatctgtctttcatttgtatcacagataatgttaataaagaaaattttaacagtaagccatgcatcagaccctctttccattatttttttcttttctttttttttttgagatggagtctcgctctgctacccaggctggagtgcagtggtgggatctcagctcactgcaacctcttcctccagggtttgagtgatcctcctgcctcagcctcccaagtagctggaactacaggtgtgtgccaacacacctggctgatttttatacttttaacagagatagggtttcaccatgttggccaggctggtcttgaactcctgacttgaagtgatccacccgcctcagcctcctaaagtgctgggattacaggcttgagccactgcacccactcttcctattattactggtgcagcccctggttcaggcaacccctgagccttggcactgattcctggaggagtcctgtgtgagtcagcgccaaacctttcctgttccttctggcttatccagattcttgagaaattgattctggggcccccaaagcaggaagtaaagaattgatgtatgccggcaatgtcaaaacatcagcctgctgttctcataaacccataagttaaggaaattctgtaatgatgactcaggagttggggcaaacatattatagaatcacagcatgtgaacagttgaatggtgcagtgagcccatctcagccctttgcttcacaaattgagttcctggccagacacagcggctcacacctataatcccagcactttgggaggctgaggcagaagggtcgcttgaggccaggagtttgagaccagcctgaacaaagtagcaagacccatctatagtaaacattttttaaaaattaaattaaattaaaaattagccaggcacggtggtacgtgtctgtagtcccagcaacttgggaggctgagttgggaggatcacttgaacccaggagttggaagctgcagtgagctttcatagggtcactgcatgccagcctgggcaacagagcaagactctgcctcttaaaacaaatacacaaacaagctgggcgcggcggctcaagcctgtaatcccagaactttggaaggctgaggcaggcggttcacgaggtcaggagatcaaaaccatcctggctaacatggtgaaaccccgtctctactaaaaatacaaaaaattagccggacgtggtggtgggtgcctgtagccccagctactcaggaggctgaggcaggagaatggcgtgaacccgggaggtggagcttgcagtgatccgagatcctgccactgcactccagcctgggcgacagagcgaaactctgtctcaaacaaacaaacaaaaaaccaaatacacaaacaaaaacaaaattcaggcccccaaccgggagctggcttttactggagaaagacaaatgattataaaagcttcaaccattggtgcataaaacttggactcagacagttgtcagttccgtcatgtatgcctcaattgtgacatggatccgtgacatgagaaggtccctgaacctctctgagcagactcaagtttctcacttctccgatgggaactggtataaaaatgtgcatggggtgttgcagggatgaaaaatgaatagatgttaggataggtgtatcctagcacagtgctcaggggtcctgcaataaccttttatttatttattttgagatggagtctcgctctgtggctcaggctggagtgcagtggcacgatcttggctcactgcaacctctgcctcccgggttcaagcgattctcctgcctcagcctcctgagtagctgggattataggtgtgcaccaccatgcccagctactttttgtatttttggtagagacgtgatttcaccatgttgaccaggctggtctcaaactcctgaccccaggtgatctgcccaccttggcctcccaaagttctgggattacaggcgtgagccaccacgcctggcctgcaatgacctttcctatcatttttgtttctagctgtggacaatgcttgatgcctcagggacatgggggtgagatggggtgcaaaaggaagaagcagggaagatatcccaagaataatgtcaggccgggtgcggtggctcacacctgtaatcccagcactttgggaggccgaggcgggcagatgacctgaggtcaggagtttgagaccagcctggctgacatggtgaaaccccgtctctactaaaaaaatttaaaaattagccaggtgtggtgatgcatgcctgtaatcccagctacttggagactaaggcaagaggattgcttgaacctgggaggtgcaggttgcagtgagctgagatcacgccacttcactccagcttgggtgatagagtgagactccatctcaaaaaaaaaaaaaaaaaaaaaaagaagaagaatgtcttagggctgagcaaagaaggcatgtgctcaaaatcccactgagggttctcctagtgtaataaggtacagaaaagaaagaactgggcttgacacagtggctcaagcctgtaatcccagcactttggaaggccgaggtgggaggatcacttgagcccaggagtttgagaccagcctgggttgtgtgtctgtactctatctagcctgggtgacagagcaagatgctgtctcagagaaaagaaaaagaaaaaagaaaaagccaggcgcagtggctcgcgcctgtaatcctagcattttgggaggtagaggcaggcagatcacttcagcccaggagttagagaccagcctgggcaacatggtgaaaccccatctctacaaaaaatacaaaaactagtcaggcatggtggcatgcacctatagtcctagctactcaggaggctgaggtaggaggatcacctgagctcaggaggtcgaggttgttgtgagccgtgattgagccactgtactccagtctgggtgacagagtgagatcctgtctcaaaataaagtaagaaagaaagaagctaaacaaacatcagtatggggatagatacacaaattatggcactattattacatgtaataatagtgttaaactaagcatagtgaatgcccaccaatttcagagagtggtggtccccaggaagggaaggagaggaataaaaacaaatcaagaggacttcatgtttaagtgttatactttattgttattattattatatttagtattttaaatctatttttaaaattaaaaaaaattttttttttttgcagagatgagctcttgctatgttgcccaggctatgttgctatgttgcccatgcctgtaagcccaaagtgctaggattacaggcatgaaccaccacatctggcctgttttggggttttaaaagagaaaccgaaagactggaaatgtaagtgagtgggtctcaacttcctcttctggagtttctcactgtcaagagatggggacaagagtcaagttatttaagggtgaaatctggcaacagacatggtgaagattgaaaagccagacacatctcatcaaagccccatctgcagtcaaaagaatgaggaaaaccatggggccaggcatggtggctcatgtctgtaattccagcactttgggaggccaaagtgggcggatcacgaggtcaagagatcaagaccatcctggccaacttggtgaaaccccatctctactaaaaatacaaaagttagccaggcatggtggtgggcgcctgtaatcccagctactcaaaaggctgaggcaggagaatcgctggaacccaggaggcggaggttgcagtgaactgagatggagccactgcactccagcctggtgacagagcgagactccttctcaaaaaataaaaaaaagaatgtggaaaaccagagaactgtagattccttttgtttatttgtttgttttatgagacagagtcttgctctgtcaccaggctggaatgcagtggtgccatctcagctcactgcaacctctgcctcccgggttcaagcgattctcctgcctcagcctcctgagtagctgggattacaggtgcatgccaccatgcccggctaaatttttgtatttttagtagagatggggtttcaccatgttggccaggctggtcttgaactcctgacctcaggtgattgatccgccttggttcccaaagtgctgggactacatgcgtgagccaccgcacttggccagattcctttttgaagggactaattcatacttaggtagggaaggagtccctaggatttagaagacagaatgagagctgaaaataatgaaatctgattataaattgtaagaaaacaggggaagtaaatatatcatgaaaagggtcaccgattagtttggaatctcacttataacaattctgctgaattgtctcttactttatggttgtcctccagataagatgggagaaaaaataaaataaaaaacttgttcagtttctcacagcatttattgggagcatttcagattaccttgaaggcatcagtaaggaattctccattttttttcttggagaattgtaagatgaaatggaagatctatccccaagaagggcagatgaaccaagtaaggcaacccactcttgggcaagagggatcatctctggagcaagactcaggtgtgatgtttcctaacatgagcggggctgttgagtggagtggtcaccggtagattatttgcagtctctgtggcccctaggagctcaattttcaaagctgctcattagctagatgtgtacagtactgtcatttcttcccctaaggcagctcaaatccttaatgagcacaggtcagacgtgagcacaaagggggaattcctggatggttgactttctgaccccaagggacaagctgtatgtcattctcttccaaccacatttcctcttatcccgagggtatctcattcttggatcctaggatcggacccctagggagctggtggaatcctccttagacagaatcccagctttctctgagtcagaaattgcttttttttttttttttttttttcaaaccaagtctcactctgcgccctggctggagtgcagtggcgtgatctcagctcactgcaacctccgcctcccaggttcaagcgattctcctgcctcagcctcctgagtagagtagctaggattacaggcacacacgacacctggcaaatttttatattttcagtagagacgaggtttcaccatgttggccatgctggtctcaaactcctgacttcaagtgatccacacacctcggcctcccaaagtgctggaactataggcacgagccaccgcacctggcatcaggtatttctttataccaacacaataatggcctagtacagtaagtttttggaaaagaaatggtgacataatgttgacaaaatgcagataaagcccaaacccagtctgaaacaaatgaagaacaaaacctaaagttgatagggtatgaaatggtgcagtgatggtgacaaaaaatggggcctgtgtgggtttctctttaaatattgaccctaaacttgggaagacaaggggaaaaatgtctgcattcataatcaaaggaatgatacttccatcgtttgatattttatgtagtttactaaggaatgattctattacgattggaaattacattgacaggcaaaagctattatgtatgaaaaatgagaaagaattagacaatggcttccaacgtaaatattaaggagaacaggtctttaagaagacagttctttcaaaaaaaaggccaagcgtggtggctcacgcctgtaatcccagcactttgggaggccgaagaggcagatcatttgaggtcaggagtttgagaccagcctggccaacatggtgaaaccccgtctctactaaaaatacaaaaattagccaggtgtggtggtgggtgcctgtaatcccagctacttggggggctgaggcaggagaatcacttgaacctgggaggtggaggttacagtgaacagagatcgtgccaccacactcaagcctgggtgtcagaaagaagacaggtctttaagatcctaagtaggaaatgataggtaaaaagtgaaagatagggaaagctgaagctatatgaggaaactcatagtaaatgttctctgctttccccttaagcttttcttttttcttttctattttttttttagagacagggtcttgctctgtcgtccaggcaagagtacagcgatgccatcatagctcactgcagccttgaattcctggactcaaggaatcctcctgcctcagccgcccaattgactgggactacagatatgcaccaccacatccagctatttttgtgtgtgtgcaaaaatgggaactcactatgttgcccaggctggtctcaaacacttgatctttccacctcaggatcctaagtagctgggatagccaccgtttcgccaccatgcccagcctaaaatcaagacatatgaacaagagaattcacaagttttctgtttctctgttgcaccaaaggcagttccatcatgacccatccagtatcttctccttctggattcaaggtgtttttgatcttgggtcttgattttgtgtggcatgtacaacctcaaagcaatatggtgaactttttttacctgctctatccctaatgtatatccacattattgaactgcattgctcaccatttatcaaaactcccatgctgccctgacacatctctggcttctcatctgaattggcatcaacacagagacctaatgcattcaagtcattggcacctgactcctgttctttaaacacccagctatgccatgattcaggataatttattttcttttatttttgagacagagttttgctccttcacccaggctggagtgcagtagtgcaatctcagctcactgcaacatctacctcctgggttcaagcagttctcctgcctcagcctccctgagtagctgggattacaggtgtgtgccaccatgcctggctaatttttatgttttagtagagacggggtttcaccatgttagccaggctgaacttgaactcctgacctcaagtgatctgtctgcctccctaaatgctgggattacaggcatgagccactgcacccggccccaacttcttcaccctttcggccttactgcatctcctctcctaatgcatagaggcctccaagccatctattcttcaaccatgttgctatttatttatttttatttattttgagatggaatcttgctctgtagccctggctggagtgcaatggcgtgatctcagctcactgcaaccctcacctcccgggttcaagcaattctcctgcctcagcctccctgagtagctggtattacaggtgcccgccaccatgcccagctaatttttgtattctatttatttattttgaaatggagttttgctcttgttgcccaggctggagtgcaatggcaagatctcggctcactgcaacctctgcttccaggttcaagccattctcctgcttcagcctcctgagtagctgcgattacaggcatgtgccaccatgcccaggtattttgtatttttagtagagacggggtttctccttgttggtcaggctggtcttgaactcccaacctcaggtgatccacccaccttggcctcccaatgttatgggattacagccgtgagccaccgcgcctggccaacctcatttctttaactaggtaactgagattcaatcatatattttccaaaacctcaaattccctactctctgtcctatcataatacctgccctggaaaacgctaaccatctgtctctcctgcctacataattctgccgccacgcggtgatatgggaagcgctaaaaaatttgagatcacctactctaaaggggccttcgacacttcaggaaatttccagtgggcaaagatcttttcatgatttctgcaggattttgaattcacaccatctcaacttccctcttttttttttttttttttttttttttttgagacagagtcttgctctgttcccaggctagcgttcagtggcaccatctcggctcactgcaacctccaactccctggttcaagctattctcctgcctcagcctcccgagtagctgggattacaggcacgcgccaccacgctcagctaatttttgtatttttttagtacagacgaggtttcaccatgttggccaggatggtcttgatttcctgatctcgtgatccgcccgccttggcctcccaaagtgctgggattacaggcatgagccactgcgcccggccacaacttccctgtttaataacaaatgattttacaacttactgcagagagaaatagtaacgaccatgagaaagatttctcaccttctttattttttctcttatcctagattcgagagatttctcaccttcttgacactagtgcgaaagtagtccagtaacaacatcaccagttctttcttctttcactctgcaagcaatgagatgtctgccttcttatctacagccagtatctcctgcttttttttttttttttctttgatacagagtctctgtcacccaggctggagtgcagtggcacgatctccgctcactgcaacctctacctcttgggtccaagagattctccggcctcagcctcctgagtagctgggactacaggcacgcaccaccacgcccggctaatttttgtatttttagtagagacggggtttcaccatgttggccaggctgatctcgaactcctgacctcatggtccacccgccccggccaaagtgctgggattacaggcgtgagccaccgcgctcggccatctcctacttttctatgcaagggtttctcatcattggcacgactgacattcaggacctggtatttctgttagagggagtagggcattctatactctaaccactagatgtcagtagtatcccgggtagtggtaaaaccaaaggcgtctccacaggtggcacaattgtccttgttaagaatcaaaacgtgcctcactcataggtgggaattgaacaatgagatcacatggacacaggaaggacatcacactctggggactgttgtagggtggggggaggggggagggatagcattgggagatatatctaatgctagatgacaagttagtgggtgcagcacaccagcatggcacatgtatacgtatgtaactaacctgcacaatgtgcacatgtaccctaaaacttaaagtataataataaaaaaagaaaaaaaaacgtgcctggcgccgtggctcacgcctgtaatcccaacactttgggaggccaaggcgggtggatcacttgaggtcaggagttcgagaccagcctgaccaacatggtgaaatcctgtctctactaaaaatacaaaattagccagccatgatggctaattacaggcttcatacctgtaatcccagctactcgggaggctgaggcaggagaattgtttgaagccgggaggcggaggttgcagtgagccgagatcgcaccattgcactccagcctgggcgacaaaagtgaaactaagtctcaaaaaaaaagggacccagcgtggtggctcacgcttgcaatcccagcattttgggaggatgaggcaggtggattgtttgagcccaggagttcaagaccagcctgggcaaacatagggaaaccctgtctctatgaaaaatacaaaaattagacaggcgctgtggcatgcacctgtagtcccagatacttggggggctgaggcaggaggatcacttgagcccgggagatcgaggctgcagtgagccgtgcactgcagcctgggtgacagagcaagacttgtctcaagaaaaaaaaaaaaaaaaaaggcatgatactggcataaaaatagaaactaaaggaacagaacagagagcctgggaataaatccaaacatatatgatgaactaattttcaataagggcaccaagaggacaaaatgggaaaaggatagcctcttccgtaaatgctgccaggaaaactagatttccacatgcaaaagaaggaaatttgacccttatcttacgccatacacaaaaatcaactcaaaatggataaaagaccaaatatatatatatatatttttttgatattacaccaaaagatcagactacaaaagcaaaaattagtagacaaatgggactacatcaaattaaaaagcttctacatagcaaaggaaacaatcaacagaatgaatcggcgatccacggactgggaaaaaatatttgcaaaccacatatctgataaggggttaatatccaaaatttataaagaactcttataaatcaatagcagaaaaacaaataacctgattttaaaatgggcaaagggtctgaacagacgtttttccaaagaaggcataaaaaaggccagcaggtatatgagaaggtgctctacatcactaatcatcagggaaatgcaaattaaaaccactgtgagatatcacctcacatccttaaggagaactatcatcaaaaagataggagaggccgggcgcggtggttcaagccggtaatcccagcactttgggaagccgtggcgggcggatcacctgaggtcgggagttcgagaccagcctgaccaacatggagaaagcccgtctctactaaaaagacaaaattagttgggcgtggtggtgcatgcctgtaagcccagctactcgggaggccgaggcaggagaatcgcttgatcccgggaggcggaggttgcggtagctgagatctcaccattgccccccagcctgggaaacaagaacgaaactccattgcaaaaagaaaaaaaaaaaggaaaaaaaagatgagagatgaatgttggcgagggcatcaagcaaagtgaaccctagtacattgttggtgggaatgcagactggtacaacctttgtggaaaacagtattcaggctcttaaagaaatctacaacagaactactatatgacccagcaattcctcttttgaatatatgcctaaaagagatgaaataatcacctcataacgatgtctgcactttcattttcattgtagcattatttacaatatccaagttacggaaacaacctgaatgtccattgatgctcacatgaatacgaaatacaaaatagcagctatgtagtctgaataatattctatctcttttgtatttatatatgatgtcaacattaatatcatataatattgatatatatttcatattatattaaatattaatataatatgttgtatataaatatatacctattacataatagatattcccattatgttatatatcatgtaatatattatatgtaatatatgtatataatatactatatgaaatacatattatatattatatgtattattatatgtatatatgctatatattatggtgtatatattatgtattatgaaatatatattacgttatgtaatatagattatatattatatatgaatatcttatatccatatatattccatacatacattttatatgtgtgtgtatatatatatatacgcaccatggtccatcccctcaataatatattttccaaaacctcaaatttccttctctctgtcttttataatacctgccctggataatactaaccatctgtctctcctgcctatataattctgcccctactggttacatgggaagccttggtttcctaaagtgttgagattacaggtgtgagccactgtacccagcctgattctggaattttgtatatgcagactcctcctgctaaaataatatatattatatataatatatattccataatatatataacatacatacatatattattttagcatatattatataatatacggtaataatacacataatacataattataataaatatgatataatatatattccattgtataaaacatataatatatataacggaatattattcaaccttgaaatagaaggaggtcctgacatttatcacaagatgggtggacctggaggacattacgctaagtgaaataagccagacacaaaaagaaaaatattgcatgacgtcacttacatgaggaactttttttaatcaagagagacagctcaaatacacagaaataaagaatgaggcagttggggaagaaaatgggaagatgtgggtcaaaaaatacaaaatagcagatatgcaggatgaacaccacacaggtgatggtgattttacgcccttcccaaggtgtcattcagaggcacgtggtctccatctgaccctcactggtgatattgatttgatcacctggtccagatgttgtccaatttcttcgctgtacaatttctattactttttctccattccaacatacgagcagtttatagagaggcatttaaggcaattcaaatattctgctcgtcatgcaaatgtcccccagttgtgtcatgtagatgacaattcttgcctgattcaacctttaccactacgatggctacaaaatgctgtgggttgtggttgaaaatttgagtcttgagtagaaattggagaaatatgctggaccgtcagattccaccggggcacggccgccatgccaatccaaacttcaaaactacaattcccagcatcctctccgccccgcttccgtattagacgccgccaatgaagtcccgcgagaattggaaggcggcagtgaagcggaagccattactctctggagtcgattgccccgagacacatgggccaaggaggggtcagcggcgaattctttcggcctgttggggacccctcgtgtccccacgccagactggacctcccgtatgaacttctcttcgcatcggcggcggcttccgtcacctccgctcccccgatcctattcccagtcgtgtaagccctgctttccttaacccttctccccctcagttccaggggtcacgggaggcctatctggcggtgaggactaagagggtacgagggtcgggggctaaagagctaggcatccagacgaggggtgcgtttagatctcgcgatcagcgatatgaaaagctggggacgcgaaggataaaattggaccattgcagctagtgatgagagaagcattggtcacctgatcctgaaaagccctaagtctctggtgggggcggaaaagcccggctgaagtgaattcaagagtttgggggcagttcaggagattggggggcgtcaggatttggacatcgcgaggagaaatcaccttctttctgcgctgtagtcaattttatctcgtgaatgtcagcacattggtgttcttattagcacttaccttgagtaccttttatatttttaatttaagaccttctggttgcacttttttatttattttaattttagtggactcttgtaaatagcctatatgtatatttactattcagttcaacattttgttaattaacttgagttagtccagttatacttatcgtgattattaatattttccattgaattttaccgtcttattttgtggtgtgtcctttcctatgcacatattttaacactggaaaataggacatacatgcaaaaaaagtatgattacacacacacgcagacttacacacacttaaaaggacaacagtaaagcgaatttacaaaccaggccaagaaagagattattaaatctcagaaagctgtgtgcctcttctaaactgcatcctcctctcccaccaatactgtctccgtggatttgactgcgtatacatcttttccagaaaatatatttcctaaattttggtaattatttgtgaatgaactcaggcgcttcagtatttttggaaacaatctttttctgtattgattcaagcacacctttgtaatttagagatttctaaatatcttgtagatgaagtacttacacctagccattctttttcaggaatgtcatggcttaaattctagtcagttcaccaaattccacatactggacttttgttttcaagttgtggtgaatctatatttgaactttgggaatattgtcgtttttatgccattgagttgcagttaattgatttacatcatttatttacatcttctttaatgcctttcaataaagtgttttttgttgttgttgttgttttttcctttttgagatggagtctcacccttgtagcccagactggagtgcaatgacaatctcggctcactgcaacctctgtctccctggttcaagcggttctcctgcctcagcctcccgagtagctgggaatacaggcacccaccaccacacccagctaaattttgtatttttagtggagatggggtttcaacatgttggccaggctggtctcgatctcctgacctcaggtgatccaccggccttggcctcccaaagtgctgggattgcaggagagagccacgatgtccggctcagtaaagttttataagtacctgcaaaaaggatttaggttgtttttgttatatttattcttgggaactttgttttttggtgctcagaaaagtctaacttttgtgtagtttgttggatgttcttcgtagacaaggaaaatgtgtacaattcaaaaggaaaatacaaatatttattttatacagacgataaattgtcttttttgtttgtttgtttgtttgtttgttttttgtgctggactgggtggggacttcccttgtcattgactggagtttggatggcacactctaggcaagcctgtttgttttctgatcttaaagggaattgtcatttgtgtctgccgaaggcttttctgtcgaatagtttttattaggtcaaggaagctcccctcttttcctacttgagtttttcttgtgaattgctgcaggcttttaacaagtgattttttttttttttttgccattatgtatctgtttattgatacattttgtatctgtttgatacaaaatctatattgatagttttgtatctgtttattgatacatttctagtaccttaaattatggcactcagtactgctgtgtaacaaattaatgagtgaataatataattttttttctatcctgtagtgtggcaaattaaaccaattgattttctcttgttacattgaatttgtattggtaaataatttggaaaggacatgttactatttgttacttttggcttcggtttgctaatactttgtttggtgtttttggatctatgcttgagtgaaatgttccttttctgtttcagatttatgccagcctcataaaatgggatgagaagtgttctgttttctaaactctggaatgttttgcataagaatagaatattttgttccttagaacgggagtggtacctggaaaaaccatttgggtctggagttttctttgtggaaagttttaaagctattgtttctgttcttttaaggtttgtggggcattcaggttttctgtgttgttatgatgagtaaaatttctttaggaatttatttattccatctgaggtttaaatcgtatagtcagggttgttcataacatactcaaatttttaatgcttgctgcatttgtaatgttatccacttttttatttataataattatatgttgctttttacaaaaataaattccatcagaatgttgtcagttttcttcttaaagaacttctggcttgattgaaccactttatgatatatatgttttctattttataactttctgattgttatcattttcttcctttttgggatgtttctttccagtttcttatgttgaatgcctgtcacatcccaaagaattgcagtatcatactttattgtattttaattataaatatcaaatatcatggcttctttggcatgcagatttagaatttttttcttttaattttcatttctgtgactttttttctggttatcttttggtcattgtttgccaactgcattgctctgtggtcaagcattttctgagacaaacatggccccatgagtgctgtctcatcatgttcaatctgcacatagttattgaactgcctgcttaaactggatttgtgagagctctggtggtggcttcatccatttctccttagaattctgtccccccttttttttttttaatttttgtgttttccttttttttgaggctgtgttttatacacacaggcacacacacacacctctttttggatttataactttttattatgtaatacttcatttttctctatgagcctttttgccttaatctattctgtctgatactaacattcaaaccagctttctttttttttttttttacttgccttatatatccttttatttccattcttattgtactcttttttctttctttctttctttctttctttcttttttttgagacggagtttcactctttttgcccaggctggagtgcaatggcgcgatcttggctcactgcaacctccacctcctggaatcaagtgattctcctgtctcagcctcccaagtagctggaagtacaggcgcatggcaccacacccagctaatttttttattttcagtagagatggggtttcatcatattggtcaggctggtctcgaactcccaacctcaggtgatccacctgccttggcctcccaaagcattgggattacaggcatgagccaccgcgcccggctcttattgtattcttatattttagatatctcttgtacgtagcatataattggattaatctattctgtgaatattagtattttagttaaagcatttattctgttagcatcttctgtattaatatatttgaatgttacatttgtcttctgttttttctctagcttcttttgtgtatttttgtcattctccttttttattttctgtacattttgaatttatttactctattatttcagtggttgttctaaataattcttacccatgctcattcactaaatctagatttgcatatgttactctcctgatttacatggttttcttatgcattttcattctttctttattgatatatcatagttgcacatattgagttctttttttaaacctcagaagaaattattattgctattgcataccatcatttcttgtttcattatactcacatgtttatcactttgagcactttacttggttcttacactttttggtgtaattcttccactgtttgctttggttctttaattacttctttctccctgaggtatgtctttgatgatgtctcttttctgtgggttgcaagcccacaggaactttgttttttggtgctcagaaaacacctctttctctctttctcagtggacatttttggtggtaatagaattttatatttcagaactatgaagatgttccattatcttctggcttccactgttaatgatgagaagtcagctgtcagtctaatgtttgtttgtttgttttctgagacagagtctcactcttgttgcccaggctggagtgcaatggcgtaatctcgtctcactgcaacttctgcctcctgggttccagcaattctcctgcctcagcctactgagtcgctgggattacaggcatgggccatgacacccagctaatttttgtatttttagtaaagacaaggtttcaccatgttggccaggcagcggttttaggagcctagaaatgtgagtttttcgttttgttttgttttgagacagggtcttggtatgttgcccaggctggtctcgaactcctgcgtgcaagtgatccacctgccttggcctcccagcatgctgggattacaggtgtgggccaccatgcccaggcttactttgtttcttaatggagagatatttacggtgtgttttaacaagacctccaggtgactcccatgtaacttaaagtttgagaactattgcttaaaaggtaacctgtctttttctcctctggctgctgttcagatattctttttaccgttggtattatctggttcattgtgcttaagattttatctctcttcaatctgtttatattttccttcaaaatgaaaaatctacagccactatattttgcagtgattgcctaggctccttctctgtctctcatcagtaactccagttagaaatggttcaattccttatcttctgcccccacgtggttcttagctgtatttatgttcctcaactctttttctgtgcttcccttgcatttattgctacaactggctttgaaacttcagccttcataaaaatttcatgtagagtttattaaaatactgattcatcagcccaccccaaagagaattgaactgagatatgatctgggtgtcagagttacttaaagtgttccaggggacgcttatgcagcagactatatttaagaaacaaattattattattattattattattggctgtgtataatctaaaagctatttacttagggcttttgttgtgggtttccattttgctttttttttagcaattgtaattgccctttagaaatcataaatttttaattttctgaatgttaatttcttgccagcacatgaatttgaaacctatcatctgtctgtactttgtgttgcatttgaaatagttatgcatggaaggtttaattggggcacctaggttgcttgttggaaacagaattcctaccctgctccccaccccctgggacatctcatctagctggttgaaaggagggtatattgatttactaatgtaatgcatttctggaccaagaaaatggcatatgatgttctcacaacctttgttgccttctctgtctctcgctatatatatattgtatatattatttatatactttttttcttttttttttttttgaggcagtgtctcatttctgtcacccaggctggaagtgcagtggcatgatcttggcttactgcaacctccgcctctcaggttcaagcaatcttcccacctcagcctcccaagtaactgggactacaggcatgtgccaccatgcctggctaatttttttgtatttttagtagaaacggggtttcaccatgttggccaggccagtcttgaactcctgacttcaaatgatctgcccgcctcagcctcccaaagtgctgagattacaggcatgagccaccatgctgggcctatatttacgtgaataacagtggtagaaatggttctagcaagggcagaaataccagtcagtaaaagtaacaaaataattattctctctacagtatttacatctgcaaattctgaatatcctgggatactgtgattaagttgaatatggggataaaatcaaatattgggagaattatggtcctgagaaagctcataatggaacagttttgggcaacatttgttttggaccacaaacttgatggaggaggcagatcttctaaaactgaggagcagggctggagcaagggtgaggtttgtgagtgcagagccagggagccactcgctctgagccaaccttgtgcttgtctgacaccagaagtgcttccttaaataccacactcttgtctagcagccttggttgcctcatcccagtcctggccctggtgaggagaaaaacagatcccaatgagaatagagtaagatgtgtagaaatagaaaaatagaactgctttcaccatgctgtaaagaaaattaaaagagaaattaagcaaccccaacagctctgaaaaattaacctgtccgttctaactcatccatggtgacagcattccaatgacactggtttttttttttttttttttttttttttgagatggagtctcgctctgtcgcccaggctggagtgcagtggcacagtctcagctcactgcaagctctgcctcctgggtttcacaccattctcctgcctcagcctcctgagtagctgggactacaggcgcccgccaccgcgcccggctaattttttgtatttttagtagagatggggtttcaccattcacaggatggtctcaatctcctgacctcatgatccgcctgcctcagcctcccaaagtgctgggattacaggcgtgagccaccacgcccggctgatcctggttttgtttcatgtatcatgtagaaacggggcagaacgtctctgagttcatagatcctacagctgttctagacaccctgctccacatcctgctggggtcgcttagatgctgaaatcttcctgctttatttgtattcatggccaccagttctttgagactctctgatacagtttggatgtgtatccgccccctccccccctccaaatctcatatggaaatgtaattcccaatattggaggtggggcctggtggggggcgattggatcaggggggcagatttctcatgaatggcttagcaccatcccccttggcactgtcctcgtgatggcgggtgagttctcctgagatccggtcatttacacgtgtgtggcacctcctcccaaccctgctgtcttgctcctgcttcaccatatgctttgcctgcttcccttttgccttctgctatgattggaagcttcctgaggcctccccagaagcagatagcactgtgcttcctgtagagcctacagaactgtgagccaattaaacctcttttcttataaattacccagtctcaggtatttctttatagcagtgcgagaatggactaatacaccatcacccagcactgacaacccctgaaagtgatagaatcactcaggtgagaacttggccagaagctccactctgagctctggtttgcatcgttgcaaaacatcgacaaggttccacagactgaattgatgtgggtgcgctctctaagctccagccctctggacactttgtccttcatggagggtggtggtggatgttggccccagggtgttgggctaagccatagggctgtgtcctagtacctggattactgtttaatttcacaggaccttctgaggagatcccagaccccctacattccataggcccctcctttatggtctcccaaggtctgggtggctgtctcagtatgaaggcaaatgtagatcagcttgctcatcatccattcattctttcattccctacttattgtcttatttatatcaggcactggaatggtgaatgaaatatcatcaaagtaaaaagtctctactcacctggaatgtattttctagttgggcatacaggaaatcaaaacaagtaaactacatagtgtgcatggaggagacagcagagagataataatgcttacccggtgttctgtgtcctgtcctacatttcccaggatccttggagctggcaggggcatgtgactagttctggccaatgggctgcaagtgcttcagggtcaaaatatagacgacagaatgcatagttgtccagcttcctgctcatcatctatgaccaacatggccaagggtatcagttggttcagagacaagtggcatccttgaacaacaggaaaacttttgacatcagcctgggttgaacaagtgacatgagcaaggcgtaaactttccattttattgagtcattgagatttgggtttgtctgtttttgcagtaaaaaatagagcctaatcttacacagaacattacttggaaattagtgctttagggaaaaagaaaaggagtggagaattgggattgaaagaagcaggggtttgcattttaaaaagtggccaaggcgggtggatcagctgaggtcaggagctcaggaccagcctggccaacatggtgaaaccctgtctctactaaaagtacaaaaattagccggacacagtggcacacctatagtcccagctacttgggagcctgaggcgggagaatcacttgaacccgggaggcgcaggttgcagtgagctgagatcacactactgcactccagcctgggtgacagagcgagactccatctcaaaagaaaagaaaagagtggccagtgaatgccagatcaggacaggtaaagttgaataaagatctgaaggatgagagggggccaggcacactgagaatgtgggggaaacatttcaagcagaggagcagcaggtgcacagaccctgaggtgggagcatggctggcggggcctgatgcacagcagtgaggcttctgtggcttgggtgagggaccagtggcagagcgagttgtgggtgaggcggcagggacctgggcccttggtctgagtgagatgggacaccatcagaggatcttgaacagaggagcggtgtgatcttcattttacccataaagttacggctgtcatggaagctaagggaagtcagggacagcagctgggagaccagttaggaagcagttggaatgttctagaagagaagcgatgccttatgccaaggcagtagcagtgtaggtggtgagaagcaaccagatttttgtattaagttttaaagttaaggctggcaggatttgctggtgatgcaggtgtggtttatggaaaagaaagaggagagttgaaggtgatgacgagcaaggcttttgacttgagcccctgggaggctggagctgccatcaacgtggggaggctggtggcagcacagttgtaggtgtttaatgtgggatcctgttggctgttgcagtagggatactaagtagccacctggctgccactcactctgagtcattctgggtggggcaggtgccagggagcggagagtggcacccactataaatgaacaattctgttaagtaattgtgaaatcgtcagtggtcattttattttaatgataatggcattttagagtgaatgtttgtttactgagcctatagagttccatacataacccagtgttaaagtcttcagtttccagatgagaaaactgagttttgatgaactgactcttgggaggggaatgagcagaactgtgggcttgcattaaaggggagtctactgaggcctcagggacagggagaccttcacagaagtgcaatcagaacctgggtgtcagcacctccaaatggtgggggtgtttcacaatgtggacctgtgggagatgggggagaggggcccaggggaaccctgacctttaggggctgggcagaggagggatctcaagccagagtcttcaaaagagcaaccagagatgtgagcacagactgggatgagtgggctatggctgcaagagcagtggcattcccaggaagagggagatagattcatagtgagcaagatgatgtgtcaggaggtcaggcaaaggaagggtcaagatgtagtgtcaaggagttcccacataggggacagtacaggtgacataggtcactttgagaggcaacaagatgtggctccgcagtcacgtcagctgggctcacaacttccacctatgaccttgaccaagtgtctcggacccttggtgccttattctctgggtacttgagaataattccgggaggttgtgaggattaaataggagtggccctggaaagactcaggagaatgtctcataccttgtaaacactacacatgtcgttatttgtagaattggcattaatgttggtggggaaaggtggaatgggacctgcagaagcttgttagttgagcatgaatgaatgaatggtaggtgaggatggagatactgtgcctcaggaactgagcctctgtcaccctctctccccttcctcagcagtgacttaatgtcagaacccaaaggcacaatgactagaaaagggctttgtaaaaagaatgaaagcgtcatgcatctttgagttggcccaagatcaaatttggtgttgaataatgaatccccaaggcagagtttatacgttaaaacacacttcctatattattgttttgaaatgtttctgaatatctaaaacaattccaatagcagaaatactaattgatgttgaaaaagattgttataaccctggtaatgtttaaaagtggtaatattgattattgatctgagtcagatgttaaagtagcagcgtcacggttcttacatcagtgctgtcatgagagtcgcggtggaagccagagagaggaggcatgttcatacaaagcaaattaaatcccctcccgaggtgtgggccaccatacctcaccaatgtattgtggttttgatgttatttccttaatgactgatgttgttaatcatcttttcatgtgtttacagttcatttctgtaaatttggagaaatgtctgttctgttcaagtctcctgcccacttttttactgggttgtctttgttgttgagtttataatgatattaaatccctatcacatacatgatttgcaaatattttccaccattctgtgtctcattcactttcttgataatgtccttgatgttaattctaaatgtttggtagggttcaccagtgaagccccttggtcctggactttttttttttttttttgagacggagtcttgctctgtcgcccaggctggagtgcagtggcgcaatctcggctcactgcaagctccgcctcccaggttcacaccattctcctgcctcagcctcccgagtagctgggactacaggcactcatcaccacgcctggctaattttttgtatttttagtagagatggggttttaccgtgttagccaggatggtctcgatctcctgacctcctgatccacccgcctcggcctcccaaaatgctgggattacaggcgtgagccaccgtgcccagctggtcctggactttttatttaatggcttttgatgactgcctcagtctcttgttataggtctctcaattttctttttcttctagagcctgtttgggtatgtttcaaggaatttgatacatctagagcattgatccccaagccctgggccacagacaggtaccggtccctggccttttaggaacaaggccctgccgcaggaggtgagcggagggcaagtgagtgaagcttcatctgtatttacagcggctccccatcactcacattacccctgaactccacctcctgtcagatcatcagcagcattagattctcataggggcgcagaccctattgtgcactgcacatgcaagggatctagattgcacactccttatgaaaatctaatgcctgatgatctgtcagtgtctcccatcacctccagatgggaccatctagtttcaggaaaacactctcagggcttccactaattctatattatggtgagttgtataattattttaccatatattacaatgtaataataatagaaataaagtgcacaataaatgtaatgcactcaagtcatcccaaaaccatcccccctcacctcaccatccatggaaaaattgtcttccatgacaccagtctctgatgccaaattgggtggggactgctagtgtagatgatctaatgtgttggtgcataattgttcatggcattctcttacagccctttgaatttccgtaaggtcggtagtaatgtcccacttccactgatgattttagttacttgcatctttttttgttagtaattctagctgtagttttgtcacctttgttgatctttttgaaagaaccaacttttgttttcattaattctcctattctctatttcatttgtctctgctttaatctttatttcttcacttttgctttccctaggtttagtgtgtcaaggtagttgtttttgtttgtttgtttgtttgtttgtttgtttgagactgagtctcgctctctcacccaggctagagtgtgatggcacgatctcagcttacctcaacctccgcctcccgggttcaagcgattctcctgcctcagcctcccgagtagctgggattacaggcatgcaccaccatgcccagctaattctttgtatttttagtagagacggggtttctccatgttggtcaggctggtctcgaactctcgacctcaggtgatccacccaccttggtctcccaaagtgctgggattacaggtgggagccactgcacctggctggaactggtttttgtatgagatgtcttactggtggcttttcctaggcaaagggaataagatctcgagttcctactggaacctaagtgttagagatggggattcaggttaaatgagtggatgtgattacctgggcaaagcatgaggcatgcgaaggaatgggtaaagaatggctcttgagcagaatcagcctttagtggtgaaagaggacctctggatggtccagatgatccagagaagcagggaaagaaccaggagacagttgtagaggagccgagaatagagaatgattctcaaagaaaatagacaccacattttcgtgagactctaagactgaagtgcatttactggattcactgacacgggagtaaattgtattttctgtgaggatggggatgatggtagtggatgctgggtgtactgaattgggagatggtgaatgtagactgctcctaagtttttgctcggaagggggcactaaggggagccagggcaggcattggtttcaagatgggatagacctgagcatgtgtccatgcataggaaattgtctagcagggcgagaaatgaggctgaaagtaaaggagagccaggtagtgcgagggtccagagacggggatgggcctggagcagatttgaaaggattgccttgagaagggagggcagacatctctttgtcatagaaggaaaggaggaggtcatagatcagttgtgagaagactgtttaaataactagaagcaagaaggtaagaaagcctcattttttttctttcttttaagcagggtttaatatatgttcaagaaaatgcataggtcttacttaggtgatcagtttgaatttttgacaattgtgtacactgtacatctgaaaataggtaagtttctatcatcctagaaagttccctttgcttctttcagtctatccctgtcttatcctccattgaagaaacccccttttttttttcaattctatcaacttaattacgttttgcctattcatggacattatattgttggaatcagagcgtttcttgtgtgtccagtttcttttggccagcatcgtagggatttctccatgtagtgtgtctgcatagtttctttttattgctgagtagtattccattctgtaaacattgcaatttgtatatccattctctggttgatagatgtttagattgtttacagtatttggctattaggaatcagactactacagacatttttgtacgagtctttgtggatataaattgtttacagtttctcttatataaatatctaggagcagaattgttggatcagatagtcagtgtgcttgttaaaaactgccaaagtgttttccaaagtagttgaactatttcacactcctaccatcaggatatgagaggtgccagtgtgccccaaactcagcagcatttagtattggtagtcttttttattttggctgttctagttttaatttgcatttctctaatgactatgatattcaacaccattcgatgtgattcttactggttttgtgaaatgtctgtttattaattaaagtcttttaccctttttgttgggttgattttctttctttctttctgttttgaaggagttctttttattttttccaataagccttttgcactcctatctaggagttctttaatctgaatacgaattctttttcaggtgtatgcattgcagatatttttttcccaatccgtggttcactgttcattttccttttttctttttctttttttgtttttagagacagaatcttactctattgcccaggctggagtgcatgatggtagctcactgcagctgttctctatgaatttttaagtttctgattcatctcaaaagatgtttaaattcaaattcagtgagtggaggaggtggcagaagcataggtggccgcgaatctctaaagtgagagttgatgtgagaaggttgcacaggagactttgcccagagagcagatttccaaatcattgcctgtgaggtgaggctgattctagtgatgatgcagtccaggccatggcccaagggtgtatatgttggtgtggagtgtgggtgcaaagggcattggagtttggaactcatggttgatcctgggtggaccatcttcatggatagagccatcctaaatgatcgcaggcctcgaaggtgaaggaagagcagaagtctaggaccagagtgtttaatgagtgagggggtttaacagagttgtacttggtggaaaatcacttaggaagagtaattctgaacccacttatagcagatcaggggctgtccccccaccacatcaccacattgctgagagagtttacctaagtaagataaaagtccaggatcaggcagatcttgctgctcaaaagaggaaatgccaaaaaacaaaactcagagttttctttggtgagcaggagagacagatagcctttcactactcccgatgttctttcatttgctacagatgccagcttggagagtcacgtgagagcaagagagtagctttctggttgtcctggtgccctgctcaggcaaactgactgccattctctgaggatggcagctctgtcccccacatttggtaagttcttgggtcagtgcgtgccctgagaaagtgagtgcaagtggcccctgccacttgatggggtgaaagatacgtacaccatagagggctgctgggagaggatgggcaagtggaaaaggggtgggaacagagccccagcagccaccccagtgactgtgtctgctgagggtcttggtgggtctgggagcaggccagtgtccttatcattcatgcatgaagagggtgcaggtaatgggtaaccctgagttatctcatttattattttgatcactttcagcaaggtcacaactctagctctcagaacttgcatttcttcactcctaggttggaactatgtcacttcttatgagtatgtagcccaccaccctctttatgtttttggtggaacagggctgctctgacttgttatgaaactgatgtgtgcaagagaggtggggggaggaagagagagagaggattgaggatgtgaacactcagaatcagtgtggagcagtttcctggtttacaagtgttgtattatgagacagggcaggctctgattctcatgaaccctgttttctcctccagccacgtccacccaggattccacctgtctccaggactcagaatttcctgtttcttcaaaagaccattcctgtccccagaatttggacctgttcgtgtgcagtggtctggagcctcacacacccagtgttggttcccaggtgcactaagatctctgggtccctagagcaggagaggcacttcctggaagaccccaccagtgcatgctggaattcttgcagagcttcatctcagccagtggatgccagaacagggcccaagagagagccaaggaatattggggctgtcctggtgttggggaagttaggggaagtgatttatgtagcatctgtttccctcatgcttgcaaaatctcaggcccttgctcagccccagagacggggggaaataaagggcaaagctctcggagtgggctagaactggagggagattagtcccttgtcagggttgcatctgaagtgacggcacaggacaagatggcctcaatggggagagaggatgtctgaggactgatgcctggaggaaatgttgagccccgtagcaggccatctggaaatcctgtgttgggtctctcatgcccggtcttcaacctcagccatcttaccatgaacatcgttaggctggttcctcgctgaccccaagtttgtgtggcgttccaggaatcggtgactttccaagatgtcgctgtggactttaccgagaaggagtggcccttgctggattcttctcagagaaaactgtacaaagatgtaatgctggagaactacagcaacctcacttcactgggtaaggccagtgccatttctccacttattcatccatgaattagatgtttttgtttgagtatgttctgtgacccaggaactatgcagcggttcagaacgcagctgtgaacaagcagccccagcacccatgcttaatggggcctctcctgggtatcgaggcccatctattgcagggaccatggtggttctccggtgtgtgtctgagcttggcatgggcttctgaaatacgaaatccccattcttttggagggtcagtgtgtgggtacttgtgatcttatttcctatttctttttttttttttttttttttatttttggtgatgaagggttctcactatgttgcccagactgatcttgaactcctggctacaggcacgagccaccatgctttgcctgtggttttgttttctatcagtcaaaaacttttactgtgttccttagaaattttggcaccaccattttgctgctcctaagtcagacttgtccaccctcagaacactgaagacccaagtgttgagcccaggctactggaaggggttgtcctctgcatggccctccctcaacctgtgtctttcccgtgagtgtagggtatcaggtcggcaaacccagcctcatctcacacttggagcaggaggaggagccgaggacagaggagaggggcgctcaccagggcgcttgtgcaggtgagcgagccccaggcaaagagcggtgctgtgactctacctctattcagtgactggggtggagggaggtaggttagggagtgtcacccagggaaattgagagatgctccttccctctttttgcccatccattctctgacaaatcttttggtccacacactccttcatctttgactttcacattcccattattgggctctttgtcccattctttcatatttgatgtttctgatcatccgctttctgtcattatcaacatcatctgaattgccttaaatttcttttttcttttttttttttttttttttttttttttgacggagtctcactctgttgccaggctggagtgcagtggcatgatctcggctcactgcaacctctgcctcccaagtagctgggactacaggcatgatgccgccatgcctacctaattttagtattattagtagacatgggtttcaccatgttgtccaggctggtctcgaacacctgacctcaggtgatccacccacctcggcctcccagagtgctgggattacaggcgtgagccactgcaccaggcctgaattgacttaaatttctacccctggcattgccaaatatctcacatgaccagattttttaacaattgcttttgcaccacttttccttacatagccttaggatctgccaagaaatccacctgtcattgtcaccatcatcccaccattttccttttccaacaattaatacttttccaatttgtttcagattgggagactccatctaaaaccaagtggtcacttcttatggaagatatttttgggaaggaaacgcccagtggtgtgacgatggtaagatttccgtgggataattctggatcttccttccacgtctgaggagactggggcagcctaggttagaaaagcagttcaacaccagggcaagcagcttccctcagaggagactgtgtttcagagacactgggtattaccaagatggagacaaccctaaagctaacctcaagctactttacctagagtgtctctgagtgaagatttttatagctgtgtctcagatattgagtgttggggctcaatgcagtttttgttttattttatatttatgctgtacacttacttatcaatttagttttggtggtgtttattttttggggggcagacagtcttgctcttgttgcccagtgcagtgggcaacatcttggctcactgcaacctctgcctcccaggctcaagccatcctcccacctcagcctcctgagcagctgggactataggcgtgtgccaccacacttggctgatttttctattttttgcagagacaggatttcaccatgttgcccaggctggtcttgaactcctggagatccatcagcctcggtctcccaaagtgctgggattataggcttgagccaccatgcccagcctcaattcagtggtttttgtttgtttgtttttgttgttgtttttgttttttgtttttttttttgaggcacagtcttgctcttgtcacccaggctggagtgcaatggcacgatctcagctcactgcagcctccacctttcaggctcaagtgattctcctgtcccaccctcccgagtagctgggattacaggtgtgcaccaccatgcccagctaatttttgtatttttagtagagacagcgtttcaccatgttagccaggctggtctcgaactcctgacctcaggtggtccacccgccttggccttccagagtgctgggatgacaggcgtgagccaccttgcccagcctcaattcagttttaagcagtgaagaaatgctatatgcaaaaagctttgaaaaagtaacacatgtggagccttgtggcctggcattcacctattgtccttgatggagctcaaatggggcagggacagcacgtttgcacggcagatggttacagctctagtcatagtaatgtgcttctatctgttcatagcagtgtatgtggggatgacgcttagggttgcaatgaatatgagaattgcctttgtcagcacttacgtcttaaccaacaggaaagagccggtcttggagagaagtccactgaatacgctcacttgttcgaagtctttggcatggaccctcatctcactcagccaatgggaaggcacgctggcaagaggccctatcaccgccgcgactatggggtagcgttcaagggcaggccgcacctcactcagcacatgagcatgtacgacgggagaaaaatgcatgaatgtcatcagtgccaaaaagccttcaccacgagcgcgtccctcacacggcacaggagaatccacaccggggagaagccttacgagtgcagcgactgcgggaaagccttcaacgacccttcagcccttaggagccacgcaagaactcacctcaaagagaagccctttgactgcagtcagtgtggaaatgcattccggaccctctcggccctgaaaatccacatgcgagttcacactggcgagaggccttacaagtgtgatcagtgcgggaaggcttacggccggagctgccacctcatcgcacacaagagaacgcacaccggagagaggccctacgagtgtcacgactgtgggaaagctttccagcacccctcccacctcaaagagcacgtgaggaatcacacgggggagaagccctacgcgtgcacgcagtgcggcaaagccttccgctggaagtccaactttaatttgcacaagaagaaccacatggtggagaagacctacgaatgtaaagaatgcgggaaatcctttggcgatctcgtgtcccggaggaaacacatgaggattcacatcgtcaagaaacccgtggaatgtcggcagtgcgggaagaccttccgaaaccagtccatccttaagactcacatgaactctcacactggagagaaaccatacgggtgcgatctctgcgggaaagctttcagcgcgagttcaaacctcaccgcacacaggaagatacacacgcaagagagacgctacgaatgcgccgcctgcgggaaagtcttcggtgactatttatcccggcggaggcacatgagcgttcaccttgtaaagaaacgagttgagtgtaggcagtgtggcaaggccttcaggaaccagtcaacgctgaagacgcacatgcgaagccacacgggggagaaaccgtacgaatgcgatcactgtgggaaggccttcagcataggctccaacctgaatgtgcacaggcggatccacaccggggagaagccctacgaatgccttgtctgcgggaaagccttcagcgaccactcatccctcaggagccacgtgaaaactcaccggggagagaagctctttgtgtcatccgtgtggaaaaggctccagtgagcgcgcctgctttagagacacaggatgattcagaccggaaacagacctcgtgggtgtaagaggaagcctctgtgagctcgcaccttactgggtgcaaaagaatccacggaacttgggagaagtccagttcctgtaaaaactgggaagacgaggcgttctcatcccataggaggtttgtgagaactcacgccgggggtgaaaatgtacgtctgtagcatggagaagccttcagggtacattcagctcttaacaaacacaggaggacttaatggcagcttggcatttaatgtcaaaatccaagccgtggcatttaatgtcaaaatgacttcagaccacttctagccttctgggcccatgagtaataatgagcacactagggagcatctctgtaaacacagtggctggggaaacccttcctagtctcacttgattcctcatgacggaaatcacactaaagagagaaatcagtgaagtaaggaacgtggaaggtcatgaatgggccgcaaaccacggccagctgcttgtctttgtatggcttgccagctaacaatagtggttccatctttaaggaagaagaatgtttgatggagaaaatttgtggccaatgaagtctgaaatacttcctgtcatctgcccctttccagaaaaacttggccgacccttggtctacagcacgggttctcagtcgggcgacgatttggctgtctaggcgtcatttggcaatgtctagagacatttttggtagttagaatggggggaagatactcctgacttgtaataagaagacatcagagatgctgctaagtcggctccagcacacaggagccccccacaacgaagagttagtgcccccaaacgtcactgttgctgaggttgaaaataatcatgcagtcattcctcaattactgcctgcagcaattcctccatttttatgaatcttgtgagcacttacgctaggagaaatttcttttacaaaacttttaaaatacaattagtgctgataattcctatgtggaaatgattccagccatggtcccctcacttgagcatgtgaatattctcacggagagaagccccagcgagattttccggtgaatacgggattgcacttactctttcatcacggaaacagaccccccgagagaagccccaacgagattttccggtgaatacgggactgcacgtactctctcatcatgaaaacagagccccgttcataaatttttcatctttatttttaaggttatactcctctaaataacccttaagcctcatcaagaaaggtttgtttatagtatttttactatagcttcatccttgataacgtcctaatttccttctggacaacctccttgaccaatggcatattgagatctatgtgacatgaggatatttctcagtaccactttgttactggtacctgatgcacacggattgcgaccagagcatgatgcctccatcaagtggtaatatgtttgcagcctgctgtccagccaagagtgacagatacttctagtgacttccccggtatccactctcatcttcttccaatatcaagagaatccaggttctgtcagattagtaaggtgtgctaatctaaattttaaaaaatctcttacaggttttcttgcagctggtaccatccatgtctcacagccctggccactgacagatcagcagatgtcaccacatgggcttctgagaaagctcttgaatggggatcgttcttaaacatgaattcctccctgtatgttttgttctttgctttacttttcaccttgcaaagagatccagtacctagtattggaagatccaccttaacgaccgtgcatatgaaaaccacagtctaaggaagtgactgcagaaagctcacagcgaccctggcctcccctgtggcctctttgagtgtctgcagcagccctggacttccagacttctatcacatgagaaaaaataaaactgattattggtttaagctgctatggatatttcattgtttttcttttaaatttatttattttaagatgggggtctccctatgttgcctaggctagattcgaactcctgggctcaaacaatcttcctgcctcagtctcccaagtagctgagaatacaggcatgtgccaccacacccagcttgtttttctatttcatttgtttattggtgggagggggtttctacacccagctggatgctgcctggagcccatacacctggtcattggtcagttgtgtggtttttttttgtttttttttttttgtttgtttgttttttgagacagagtcttgctctgtcacccaggctggagtgcaatggcgcgatctcggctcactgcaagctctgcctcccaagttcatgccattctcctgcctcagcctcctgagtagctgggactacaggtgcccgccaccacacccggctaatatttttttgtatttttagtagagatggggtttcaccgtgtgagacaggatggtcttgatggcctgacctcatgatccgcccaccttggcctcccaaagtgctgggattacaggcgtgagccaccgcgcccggccatgttcagatgactgattagcctatcaaaggcattcttccgtttctttatggtggctttgatttctgatctttccttctgattctttgagtctctatttttctgctgatgatgtagggcagatgagcccccaaactgggggttagcccaggagggttcttggctttgctcaggaaagaattcaagaggcagccagcagtaaaagaaattgggtttattgaagcagcagggcacagcagagtggctgccccttgtggagcagggctgactcataggcagtatacccagggtagcagcatataggctgttggctagcagtatttatacccagttttaattacatgcaaattaaggggtgggctattcagacagcactcctcattcaccttccaccatgattgtgaggcctccccagccatgtggaactatgagtccattaaacctctttatgaattaggcagtctcaggtatgtctttattagcagtgtgagacacagttgctccggcctataaatgacacatagttttaagtctgtttcctgcagttctcctatgattggccagggttttgattctgttttgtttttttgcattttcaaattaagggtagatgattctgagggtcttgctccagctctgtctcaggcccccccaccagctatccctctttcttgcagtttacctaacagagccttggggtgggcatgtgtgggaccgtggtgctaagatttaatgctttttctcattttactcatagttatgttgcaattttggcattctctatgtcttaaaggcagtgttgaaggtatagttttgtgtagaagattcataggtgtggagttacttcacagcatttgaaaggggatttggggaggttgcttaccactcactggccattgtttttagttacctggaagtctcctcaccttagtttttggagatactttggctgaatatgttattttattttattttaatttattttttgagacagagtgtcgcccaggctggagtgcagtggcatgatctcagctcactacaacctccacctcccaggttcaaacgatcttgtgccttagccacctgagtagctgggattataggtttgcaccaccatgcctggcaaatttttgtatttttagtaaagttgaggttccatcacgttagccaggctggtcttgaactcctgacctcaggtgatctgcctgcctcagcctcccaaggtgctgggattacaggtgtgagccaccgcgcctggtctggatatgctttaaaggggtcatttctttgtcttctggcctccattgttgctgactaaaagttagcgttattcttaacattattcccctgtaagtaatgtaagtaatgtgttgcttgtcactggctcctcttcagataattatcttgggttttcaacagtttgactctgtgtcttggtgcagtttcctgtgcatttactctgcttggggatccttcagattcttagatacgtgagtcactgtctttcacaaggaagtatttggccattatttcttcataattttttaattgtggtaaaataaacataacatgaaattcactgggtttttttgtttgtttgtttttgttttttgaggcagagtctcgttctgttgcccaagctggagtccagtggtgcaatcttggctcactgcaacctccacatcctgggttcaagcaattctcctgcctcagcctcctgagtagctgggactataggtgcgcaccaccatgcccagctaatatttgtatttttagtagaaatggagtttcaccatgttggccaggatggtcttgatctcttgacctcatgatccacctgcctcggcctcccaaagtgctaggattacatgtgtgagccaccgcgcacagccccattttaatcattttttaggtgtactgttcggtggcattaagtacattgacaatattggctaccaccactatccattttcagatctttctcttcattccaaaaaattatgtacccattaagcaatcactcctcaacacttctatcttcagcccctggtaacttgtaggtagtgtccatgaattttgtcagaagtagaataataaaatacgttgttttgtgtgcgtctgccttatttcattaaaagtaatgttttcaaggcttatccatgttgtagcatgtatcagaatttcattcccttttatggcttaataaattctgttgcatgtatgtgtcacgttttattcattcatctattgatgaacatttgggctgtttctacctcttggctattgtgaatcatactgatattgatgatttttttttcttttttcttgagatgcagtcttgctctgttgcccaggctggagtgcagtggcgcgatctgggctcactgcaacctctgcctcctggattcaagcaattatcctgcctcagcctccaaagtagctgggtactcgccgagtagcctgccaccatgcccggctaatttttgtatttttagtagaaacggagttttaccatgttggtcaggctggtcttgaactcctgacctcaggtgatatgcccgcctcagcctcccaaagtgttgggattacaggtgtgagccactgcgcccagcctgaagacagcattcttagcatgaaggatgcaaagttgaggcaaaggagatctatccaaaccaacctcattacactacggcttctgagccacttctctacctgattaaccaccctagcccacacccttggttttatcccattagcgcagtttacttgtctgtccaattcagtttataagtgtttggctcttaactgcttttctggcttgtttccttatgaggaaccccatgccacataaaactttcattaaacaaatacatgtgtatgctttaatcttgttaacctaatcgtatgtcggtgtaattatcaggcccagcaaggatcctaagatgatgaaggtgaaatcttgttgcccctacaatatggacattggatgcaagtgtctgtgtgagttcctgctttcaattctcaggaattttccgaagttgttttcttcctcattttctccttttgggactccagctgcgccacaggactctgaagttcctgtttcatttttctaatgtgtttgttttccagtttgtatgacttctactgatatatcttaaagttcactaactcttctgtcctcttcatctgtggaatccatttagtgactccttaaaatccagatgtctgaggtccttaggaaaacaggtgcttctccctgttgtagcttgaatttgctctgaatgtggtggtcccctaagccaataacacaatgcctcctggcctgccctggccacccagggaggaatgaagggagaggtaggtgtagtggtaataagccttgctgtgcacagctttgtgtaataactgaaaagggtgatgtgttttcctgctcccatccccaagcctgatttcttcaagatgcagtaactgggacgggtgcagtggctcatgtctgtaatcccagcactttgggaggccaaggagggaggatcacgaggccaagagttcgagatcagcctgaccaacatagtgaaacctcatttctactaaaaatacaaaagttagccgggcgtggtggcgcgtgcctgtagtcccggctactgggaagctgaggcaggacaattgctcgaacccgggaggcagaggttgcagtgagccgagatcacaccactgcactccagcctgagcgaaagagtgagactcggtcaaaaaaaaaaacaaacatgtagtaactgacaccccccacacatgccctcccctccacctcctgttatttcattagaaaccctgccaaggaacaaggaaatcctacaaagaaggtgtctcaggtacccatcagcagccatgcagtgatgacaagtgggtctgatgccattaaaaggttgttttcaaaccaccttctgttgcaagcagaacccaattgcacaggaatccaagctccatgatggagctttggccattgtttttagttaccaggaaggaaaatggcaagattgagattaagcctggaggcccggcggggacctcatggctgtgaagaccctggactcctgtgttgctggagatagtgtttgtgctctcacatggtctgctcagccgtctttctgccattcagcacaacggaaggacctagtgtgtttccagggtgggagcctacgagtggtggactctgactttgacattcgggacagatttattccttaattttcttccttacatacttggttcatctgagggcctcagactccctctccaacagccttctaccctctcccatttccacattttcatttttgagcttccttagctaagtggttttactttcttccctttccatctctctctctctctttatatttctttctctagatttttaaaattctgtctctctcttttctccaatttctccatttccctcttttttttttttttttttttttttttttctttttctaagtcagggcctgactctgtcgcccaggccaagtgcaatggcatgatctcagctcactgcaacctccacttcccaggttcaagggattctcttgcctcaccctccaaagtagctgggattacaggcacacaccaccacacccaggtaattttttgcatttttagtagagacaaggcttcaccatgttggccagactgatctcgaactcctgaccgcaagtgatcctctcccattttggcctcccaaaatgctgggattacaggcgtgagccactgcgcctggccttacattgttattctgcacacattggccattgcgggcatcgttccttacctgagtgaacacatccatgcattcctaatatgtgtgtcctgggaaacctgggtttggagtttggagtttggagtagagaggccaagggtttgcagtcaggcaggttacttgcaaaatatttacgtatcagtcagatacattggctcatgcttgtaatcccagcagtttgggaggctgaggctgggggatcacatgaggtcaggagttggagaccagcctggacaacatggtgaaatcccgtctctactaaaagtacaaaaaaattagctgggcatggtggtgcatatctgtattcccagctacctgggaggctgaggcaggagaatcacgtgaaccagggaggcggaggttgcagtgagccgagattttgccactgcactccagccttggtgacacagcgagactgtgtctcaaaaaaaaacaaaaacaaaacaaaaaaaaattatatatatatatatatatatatatattatgtattgtgctaagtttcttctttgtaaaagcccttgggggactgttaagtgtgtgtctcagcttggatttgggtttttttagaccagagatccctggtccctttggaggtgtgagtatgagggtatttgtgtctcttgagaaggtctaagagttgccatcagtttggtggcagggtatgttgtacttagagatcttgtcagaatggataactcattttacctccatcacttacgaaatgacttttatcagctacattaaaatgctagcaatgtcatactacattctcataaatactgggaattaactaatgactttcttgtccaggtatttataggctttggcaaggcagcagtacacaaaactggtcccattcatagtaatcttgacgttaaactttggagccagagtacaagcgaataaataaacactaggaagaaaagtaaatgcggagaagaataaatgctgtgaggaagagtaaagttgaggaggggaacagacagatgggattgacccgttcaacctgtgcagtgtacagcgtatactcttttttttttgagatggagtctcgctctgtcgccaggctggactgcagtggcggcgatctcggctcactgcaacctctgcctcccgggttcaagcggttcgcctgtctcagcctcccagatagctgggactacaggcacctgccaccacgccctgctaatttttttgtattttagtagagacaggggcgtacactcatttttggccactttacctttttaggaaacaaaatcatcacagaaatcctcaagaggcagctttcctgtacatttcagtttctcctaaaacagaacagggctgggaatgcttactgaggaatcatcaaagcatttctttctgtcatgacaagagcaattccagcttgctccatgagaccctgcttctctcactgtatttggttttcaggttgcaagatttgaagaacacttgtcaaaactcgacggttatttctgttttcaaggactgtttgatctgcattttcttccagtccattcatttctatctggtttggcctccaaggtcttaatcttttgcccaagaaaacgcttacatttaagcaacatgagttccttgatttgtctgtagcccaatgctactttcttgagttcagaataaaagctgattattattattatttattgttattattattttgagacagagtcttgctctgtcacccaggctggagtgcaatggtacgatctcggttcagtgttacctctgcctcccaggctcaagcaattcttctgccttagcctcaggagtagctgaggttacaggtacccaccaccatgcctgacaaatttttgtatttttactagacagaattttgccatgttggccaggttggtcttgaactcctggcctcaagtgatctgcccacctcggcctcccaaagtgctgggattacaccagccttgggacttgacagtttttttttttttttttaagatggagtttcgcccttgttgcccaggctggagtgcactggcgcgatcttggctcaccataacctctgcctcccaggttcaagtgattctcctgcctcagccttcctgagtagctgggattacaggcatgtgccaccatgcccggctaattttgtatttttagtagagacggggggtctctccatgttggtcaggctggtctcgaactcccaacctcaggtgatccgcctgcctcggcctcccaaagtgctgggattacaggcgtgagccaccatgctgggcccttgacagttattttgacctaacattggtgataatttttctctacctcaaccaagaagatggcggattggagcacttttttcatagattgaccagtcttcccaacaacactggaggccagtcatttactttctgcagagaaagagacatgtcaaagagtcaacttaccagctggaaactgggactagtgtcaagtgcttactctgacattcagctcttgtttcacctcttgacccctttcatgcctgcatcaaccagtggatctgctgggctcagagcacatgacaaaggggcttgtggtgttccacttggcttcctgaaatcccttcctttcccctggcagtgcttccacgcaggactttgagtgtgtagtcggggcagtttacatccccaagtgaaaatgctgaacgttcagcaagccttggtcaaaagttttcctaggctcactagtgaagaaatagcaattactcactggctattgccaggattgagaaaaagaatgtgtaccctagaggccgggcccaaggggaagagagtactttctctcagcattgagtaaaatcggccattttttaaatgagccttgggaaccagcataactggtccctttgtgcccaatttctccatcccgataatgaattccatggataacctcagtggcccatgacagttgcctctcattgcacttccctgccagttctcagaaagaaagtgtcacacagtctctggagggaacttctaattacaggaacacagtctgcttgtctgagtcttgttttcagttcttggaccctctccagcagggaaaatctctgtcttgtgtaacctttgggtaacatccaatccactcaggaattcttccctgctagggaacctattgtatatacccaatgaatattagctaagtgccttacacttttaattaggttttgggaagaaagatcaataagacaaagtactgcccttaagaaagtaaaggtctaggagaagagcgatattaacagtaaataagacacctagtatggcaggtgaatccatttgggaggccccagatgaggaagatgttgaactgggggccatcaagaaaatctaagtagaagagatgatgcaagctcagtgtagaaggatgattatgattgtgattatgattatttggagatggagtctcgctctgttgcccaggctggagtgcagtggcgcgatctcagctcactgcaacttccgcctcccgggttcaagcggttctcctgcctcagcctcccgagtagcagggactacaggcacacgctgccatgcctggctaattttttgtattttagtagagacaggttttaccgtgttctcaggccagtctcaaactcctgagctcaggcaatctgcccacctcggcctcccaaagtgctaggattacaggcatgagccaccgaggcctgccttgtagaaggctcattaagagttcaggagcagaatcaaataagcatgctaatcctgagtgcaaaggcactgaaaaaatgacagtatattacattctgtagataaaagacaatctttggagtaagaggcagacttgaaaggtaatatgggacagattggagaacacacacatttcctttattctctctctttttttaaagactcggtctcattctgtcacccagattggagtgcagtggcatgaccatagctttctgcagcctcaacctcctgggtttaagccatctgccaacctcagcctcttaagtacctggactataggcacacactaccatgcctgactaattctattttttttatttttgtagagacacagtcttgttatgttgcccaggctagtctcaaactcctgggctcaagcaatcctcctgcctcagcctaccaaagtgctgggattacagtcatgagccactgtgcctggctcacacacatatatctatatgttagtctactagtttcaatgtaaatgttagttggaaatcgatggaaacaaattgatattcaatgaagtttgcagttgagcaaggtaactggttcccagttgcggaatggaatgaagggtcctgtttctatgagcttttgtttcatagccacccaaaacatggtggtttaaagcaaccaccaggccgggctcagtgtctcataatcccagcagtttgggggccaggcaggaggattacttgagtccaggagttcaagaccagcctgggcaacatggtgaacccccgtctctcaaacaacaacaccccaccaccttttatttagggtttgtttgttgacaatttgggctgtgcttagcctgagagttctcttgactggcttctgcagtcactgtctaggtggggtggggtttattgttcttcgttcaaggtctcattcctccagtcgtccaggtaaggcctgttcacacattgctggagtgttccagcagagcttgtattgggaatgcctatgccccatcagccagtgcaatcatgggtgagcccaaggtggaagggcactcagttacacaaaaggggcttggatatagggaagaaaagacacagtggccattcttttctgcagttggccacaaggccagtatattattgcaagagtctaagtaaggggaacatctttattgagaagtgatgaacatgtgggaaattcacatatttatttatttatttattttttattttttttttttttgagacagagtctcgctctgtcacccaggctggagtgcagtagcgcgatctcggctcactgcaagctccacctcctgggttcacgccattctcctgcctcagcctcccgagtagctgggactacaggcgcccaccaccacacccggctaattttttttgtattttttttagtagagacggggtttcaccatgttagccaggatggtctcgatctcctgacctcatgatccgcctgcctcggcctcccaaagtgctgggattacagacgtgagccaccgtgcccggccgaaattcacatatttaaagtatacaacctgatcaattcccttctctctgtcttatcataatactttccctggaaacttttttttttttcttgagacagagtctcaccctgttgcccaggctggagtgcagtggcacgatcatggctcactgcagcctcaacctctcaggctcaagtgattctcctgcttcagcttcctgagtagctgggactacaagacacatgccaccatgcctggctagtttttgtattatttgtagagatggggtttcgccatgctaccctggctggtatcgaactcctgagctcaagcaatcctcccatctcggcctcccaaagtgccgggattacatgcatgagccaccgtgcccggcctgattccaggtctgatagaaaaactcaaccaactgcctattggaaaaactttgaatctgcatatgacctggaagccccacttccagttgtcccacctttctggactgaaccaatgtacatctttttttttttttttttgagacggagtctcgctctattgcccagactggagtgcagtggcacatcttggctccctgcaagctccgccttctgggttcatgcccttctcctgcctcagcctcctgagtagctgggactacaggtgcccgtcaccatgcccggctaattttttgtatttttttctggtagagacggggtttcaccgtgttagccaggatggtctcgatttcctgacctcatgatccacccgcctcagcctcccaaagtgctgggattacaggcgtgagccaccgcgcctggccgaaccaatgtacatcttatacgtattgactgatgtttccctaaaatgtgtaagaccaagctgtagcctgaccactttgggggcacatgttctcagggtctcctggggttatgttatgggccattggtcactcatatttagctcagaataaatctcttcaaatattttacagactttgattcttttcaccaacatccatatgagaatttagttcatcatacagacatatcacaagtcaagtcagaaaaggcaaattatgtaaaaaaaaaaagtgcttaggaaactagaaaactagaaaatttttttttaattaaaaaattttttaaaaattcctaaataaataactgatagaaaagagaatgagggctgggtgcagtggctcacacctgtaatcccagcattttgggaggccaaggggggaggatcacctgaggtcaggagttcaataccagcctggccaacatggtgaaaacttgtctctactaaaaatataaaaattagtccagtatgctggcgtgcgcctataatcccagctacttaggaggctgaggcaggagaatcgcttgaacccaggaggcagatgttgcagtgagccgagattgtgccactgcacaccagcctggatgacagagtgagactccatctcaaaaatatatatatttttatatatttttattatatatattttatttttatatatatttattattatatatatacatatatatatatatatagcaagaattagatgccattttaatagactttatttttttagaacgtccaccaatgctgctttgattcaagtccacatgatctgtcatctgggctgtaggtagcctggcacccttcctgcccattctgcaggggaacatcattgtacacattttttttttaacacccggtgctcttacttccctccagaaggaaacctaaactccagtgtcctccatgatctgactcctgttttttgctccaactccatctcttgttccatcaccctcctgtcttctaatccatcctttgtattaagaagcaaattacctaaaccttttaaataaggcaaaaggatgaccgcattactgttcagtatcatgctgaagcattgtctgacaggcctagctagttctttccttctcaaggcaatgttcgtttgtttgcttgagacctggactctgtgaagttattgccaacccacagggaattaatcaattgcaaatgatttttgtccagtcgagttgcaaattacttcaattgcttctgttcagttaaaaagattacccctaaatggccaggcgtcatggctcatgcctgtaatcccagcactttgggaggccaaggtgggtggatcatttgaggccaggagtttgagactagcctggccaatacggtgaaaccccatctctactaaaaatacaaaaattatctgggtgtggtggcacatatgcctgtaatcacagctactacgcctcaggaggctgaggtgggagaatcacttgaacccgagaggcagaggttacagtgagctgagattgcgccgctcactccagcctgggtgacagagtgagactgcaccaaaacaaacaaatgaaaaaaaatgaaataatgtgttaataattttatattaaaaattatatttcagaaaaaatatttaccccttttttttttagacggggttcgcttttgttactcaggctggagtgcaatggtgcaatctcggctcactgcaacctccacctcttgggttcaagcaattctctcgccttagcttcccaagtagctgggattacaggcgcccacaaccacgcacagctaatttttttttttttttttttttgtatttttagcagagacagggtttcaccatgttggccaggctggtctcgaactcctgacctcaggtgatccacctaccttggcctcccaaagtgctgggattacaggcatgagccaccgtacccggccaagcacattttgttgtatatttgaagtactcgaaatttattcctgcaaaccacacagatttttgtacatttaattttaattttaaaagatctgtcagtcattgacagatgaatggataaacaaaatgtgtgtatatacatataatataatgaaatattttgtggctttaacaaagaacattctcctgagcatggtgcctcatgcctataatcccaacactttgggaggctgaggcgggaggatcactcaaggccaggaatatgagaccagcccggccaacatggtgaaaccccatctctactaaaaatacaaaaattagccggacatggtggcgcacacgtgtaatcccagctactcgggaggctgaggcaggagaatcgcttgaacctcggaggtggaagttgcattccagcctgggcgacaagagtgaggctttgtctcaaaataataatataaaaataataataataataaatagaaaaacaacaaaaaataaaaaacaaattagctaattgggagactgatgtgggaggattgcttgatctcaggtctttgggattgtaatgagctatgattgtgccactgcactccagcctaggtgacagagtaagaccctgacaaaaaagaagaaagaaaaaaaaagagagaggagagagagagagaaagaacattcggacacatatacagcatacatgaaccttggcaatatttcacttaaatgaaataagtcagtcacaaaaagacaaacagtgtatacttccgtctatgaagtaggtaccacagtcagaattatagagacagaaagtggtatggtggttcattaggggctggggagggtgaatgagggatgagtgttacgggacagagtttcagcttggggagatgagaagattctgaatatggaggatagtgatggctgctgtgaatatacttaatgccactgaatagtacacttaaaatggttaagatggtgaactgtatgttatgtatattttaccatcattttaaaaattgaaaaaaacttttttcttattgttcagttcctcccaaacttgccatcaatgaaattttccccatcactctacccagatcgctgtttctaatgttttccatgccattaaatgtgatggatattcttcagcctttattttgcttagccttatagcatcgttttacatggttgttagaaataaatcttggagtcataaagaaaaatgagcactcaaacaaaggatttctcagcaaagcaaatttacttctgcgcagaagggtgcttctcgtagggttggctgctacaagagcaccctgaacaaaggagagtagcaacttttattcttaatgcgactcttgactttgtgtgtcctttccccattggctggggtcggacagcacaatctaaactagacttgattggttacacatttaaactgtcttagataaggtgggtgtgtgatgggagacagaggagaggaggaaggggtcttctacagaggaatagacagctagtctattcttaaataaggaaagaaatgtgagctggggctatggcatatctgggcatgcagcaaaatcagaaagaagaaaaggagaagaaagtgtgtggggggggtacttggaattagagaataagaagctgagcaggctgtttgaagagaaatcttgctgtatctcgcaatggttgactctccctctcttgaaacaggacttacgacatgtccacagcctgtttaacgccctgcagccaacgcgatcacaggggattcacggaaatagttgcatctctattttcttctgtgttaccttgagacccttaggcactgggattacagagagatgggtctttgtagcttctgcgacacattccagaggggaaaacctctttatctcaaagccaaaccaatagtgatgaaagctcttccaagaataaagaggccccaagagggtgggaggtgcagagagagtcacctggcttcagagctgccttcttggaaacagaattagaacacatcatacctttctgccatttgctcttgatcccaagggagccgaatgggttggagagtagaacatcactggaacagtggatttaatgaggaaggatgagacatcagctccctggggcttgagaaaccataaatacttccctaaaacacctcacctggacagtttcctgacgccacactcatgcatcttagagaggagagttaggatgacttcatgacaagttccatctccccgcctttccctgctagattctgtcttcagcattcaacagtcaggggaggaagacgtcataccagcatttttttttttcaagcaatgtcagttgagtgactcacactatccttgttagtaccgtgtgtgaaaaggatttaaaaagtagtgtggggaggaacagagatggaggtaacagggttgataatgtctcatgatttttaaaatgtctctaggattcccttacctggttatagatgtcttaaggcattgcaacttttgggaggctgaggcaggcggatcgcttgaggccaggagtctaagacaagcctggccaacttggtgaaaccccatctcatctaaaaatacaaaaattagctgggcatggtggcggatgcctgtaatcccagctactcgggagcctgagtcaggagaatggcttgaacccgggagacagaggttgccatgagccaagatcacgccactgcactccagcctgggtgacagagtgagtgagacgctgtctcaaaaaaaaaaaaagattctattgcaactgtttctgtcacctccacctctgatggcctttcattctggaaactagtgactttctcaatgtcagtaggaactggcacttccttgagtggattcctttcagtctacctgctaacaccttcctttttcttctctagtataatataatagttctcggccgggtgcagtggctcatgcctataatcccagaactttaggaggccgaggcgggtggatcacaaggtcaagagatcgagaccatcctggccaacatggtgaaaccctgtctctactaaaaatacaaaattagccgggcatggtggtgtgtgcctgtagtcccagccatttgggaggctgaggcaggggaatttcttgaacctgggaggcagaggttgcagtgagctgagattgcaccattgcacttcagcctgggcaacaagaacaaaactccgtctaaaaaaaaaaaaatcaacaaagcaaagcaaaacaaaacaagtatgtattaaatgttcactctgcaccagatgttacatatattatcattgcaattgtgaatggactttttttcctcttattttttctcatggctgtttgcagatacataagaaagctgatgacactgattagttgtaattaattgtgtttaagttgactttttttttttttgagacagggtctttctgggctcaagcaaacctcctgccttggcctcccaagtagctaattttttaaaaatctatttttgtagaggcaagtgtctcattttgttgtctaggctggtctcaaactcctggcctcaagaatttctcctgccttagcctctcaaagtgctgggattacaggcaggagtcacagcacccagccaggctgttacattttattaaatgaattttagcttatgttaaaaccatggtttctttttctgccttgctctattcacgcatatactttgttatctgacttgccgatattaaattttttacactcttaggataaatattcattagtaatggagtgtgttattttatccaaaagataacttcatttcactcccctttcaggcttttgcatctgttgtcaacatgagattaatttgcagatttcttgtttgtcttatatgtgatttttttttttttttaccttcattcagctttccatgatgagtacaaagccttggggaatatctggataaagtaaaattttctagaatgtgatctggacttgccacaaagaaacttcaggttcgtcgggcttcatggtgtatttgtctaaatatttaagtaaaaaataatgctggctgggcacagtggttcacgcctgtaatcccagcactttaggaggctgaggcgggtggatcacctgaggtcatgagtttgagactagcctggccaacatagtgaaaccctatctctattaaaaatacaaaaattagccgggtgtggtggcgagcatctgtagtcatagctactcaggaggctgaggtgggaggatcgcttaagcccaggaagtggaggttgcagtgagctatgatcatgctactgcacttcagcctgggcaacagacccagaccctgtcaaaaaaaaaattgtttcacataactacagtgcaatgatcacaatcaggaaattggcattaataccatattatatatagtattatagatatataatacactatttgctatatactatattagtaatatagtaattagtatatagcattaatataatactataaaatttacagagctcatttatattttatttttttatttcttctcatttatattttaattatcccaataatgtcatctatagcaaaagaaagactcaagtcatccattacatttgattgatatgtcttttttgcctcctttaatctggaacatttcctagacttttttttttttttttttttttttgagatggggtcttgctctgtcaccaaggctggctgggttgcagtggtgcaatcatagctcactacagcctcaacctcctgggctcaggcaattctcctgcctcagcctcccaagtagctgggacaacaggcatgtgccaccatgcccagctaatttttgtattttttgtagagaaggggtttcactatgtttcctaggctggcctcaaactgctaaactcaaacgatactctcacagcctcacaaagtgctgggatcccaagtgtaagcctccatgcctggcatttctttgtattttatggcactgacatttttgaagagcacaagtgagatattgtgcccctcaagctcagtttgtgtgatgttccctactctttaaagttctgcgtctttggcaggaatcccacagaaatgatgtttcgctgtttccagtgaatcctatcagaaagcacatgtttattatgtcccattaagaatctccttgaccatgtaataggggtgctataaaatcagtgttaagatagatggttgggattagagagtccattttctagaattctattttgtttgggacgttataaaatggatatttaatatgggtggttaactatgagatatttcctcacgcctgttagaattgtttattattattattcttttacctatgaattggcatttttgtttatttatcagtttgtgaaaatgtccttaatttgttgaggtagcaaacaaatttcaactttgattgctatgcaaaaccagaagataatctgctttgcaatgaactttatacagttcagctgcatataggcaacatgctatatatgaaaaaaatactaactgaactacaggtattaaatactgaaatgagttaacagtttattataatttattgtatttaacaatctaggaagttcgcagccatcagcagttctagtgcaatttcaggcgcaactgggaattcgggaatctcggtggagctgttagcgtagcgaaccttgtacataaaatacatgcatactttatttatttatttatttatttattatcattattattattatttttgagacggagtctcgctctctcgcccaggctggagtgcagtgtcgcgagatctcggctcactgccagctccgcctcccgggttcacgccattctcctgcctcagcctcacgagtagctgggactataggcgcccgccaccacgcctggctaattttttttgtattgttagtagagacggggcttcactgtgttagccaggatggtctcgatctcctgacctggtgatccgccctcctcggcctcccaaagtgctgggattacaggcgtgagccaccgcgcccggccacatgcatatacttttgatagcacatgtgaagggatctctctaaaatggacctcatcggcttcgttctcagcaaattgacctgggccactcaacatggcttttatcgtgcccgatgttaatgcacgttcttttttgacaataaattcatggccatcagataatatcaatttgacatacacggcatcagggccttcacagccaccgtaggttttcttctcaccatccattttgttcttacgaaattctactttgcttccccaggaactttagtagtttctcgtcaggcccacagccagcgcagcagggtccgtgtgtactgccacagcccctattccaaggccgccccaccccgccccgccaacccagctgcctgctcccgtgggtgggttccggggcagtggaaagaattacttcagctgggtcagagccgctttctgtgactggtgggagatccgtgtaattttttattttaagacatggtctcgccctgtcacctaggctcaagttcagtgtcacaatctcagctcactgcatcctcgaacactgtggctcaaagcgatcctcccgcctcagcctcctgagtggctgggactacaggcacatgccaccatgcccagctaatttggtttatttttttgtagagagcaagtcttactgtgttgttcgggctggtcttgaactcctggcctcaagcaatcttttcatctcagcctcccaaagtgctggtattacaggcgtgagccaccatgcctgaccttagaattattaaccattactagcggttagctaacaattggctctattattagctaactattaactaactattcactattattaaaaagacaagagttggccgggcgcggtggctcacgcctgtaatcccagcactttgggaggccgaggcgggcggatcacgaggtcaggagatcgagaccatcctggctaacacggtgaaaccccgtctctactaaaagtacaaaaaattagccgggcgaggtggcgggcgcctgtagtcccagctactcgggaggctgaggcaggagaatggcgtgaaccccagggggcggagcctgcagtgagccgagattgcgccactgcactccagcctgggcgacagcaagactccgtctcaaaaaaaaaaaaaaaaaaaaaaaaaaaaaaaaaaaaaagacaagagttggcaagggtgagaagaaaagggaaccccttgtgccctgtcggtggtaatgtagattggagcagacattatgggaaatagtgtgagggttcctaaaggaattaaatagaggccgggtgtggtggcttacgcctgtaatccccagcactttgggaggccaaggcgggtggatcacttgaggccaggagttcaagaccagcctggtcaacaaggtgaaaccctgtctctactaaaaaaaagaaaaaatacaaaaaatacaaaaattagctaggcgtggtggcacatacctgtaatcccagctactcaagaggctgaggcacaagaatcgcttaaacttgggaggtggaggttgcagtgagctgagatcacgccactgcactccagcctgggcgacagagaatctgtctcaaaaaataaaaaggaaaaagaaattaaaattttgagactctttctcaaaaaataaaaataataaaatcaaaaagaagaaatttaaaataaaagaaatttaaaataaaaagaaattaaatatgatccagcaatccctcccctggatatgtatccaaagaaaatgaaattgccactcgtaaagatatctgcatgctcatgttcattgcagcattacttgcaaaagtcaagatatggaaacaacctaagtgtctgctgatggagaaatggctaaagaaaatgtgatatatatgtatatgtacatttgtgtgtgtgtatatatttgtgtatatatattccattgtgtgtatatatatgtatgtgtgtgtatatatatgtatgtgtatgtgtgtgtatatatatttttacacaatttttacaatcaatattattccactgattgataaaataggaatagatcctgccatttgccacaacatggatgaatctggaggccattatgttaagtagaataagtcagatgcagaaagaaaaatattgcattttttcacttctatgtggaatattttttttaaagtcaaatatagagaataaaacagtggttaccagaggaggggtgcggctgggggagaaaatgaagaagatgtaggataatggatataaagtagcagatatataggataaacgagtctagagatccagtgtacccatgaaaattatagtcaataacagtatgtagtattccggatttatgctacatcagtagactgtagctgttcttgctataaagaaaatgggtaactatgtaagacgatggatatgttcatttgtttcactacagtaaccattttactatctatatgtatctcataacatatatagtatacgttgaatatacagaatataattaatttttaaataattaaatatatgggtggttgagatgagagacttcattttttagaattccatttacgtatgaaagattagacaaaatgagtccataaatcacaagtaaatagtatggacaacatttctattacatgaaggatgcccgttggatgttaactgatgtttctcttaccgcttccttttaaataaataaataaatataattttaaataaatatgtatattttaaaataaatacatatatacatagttttatttttattttattttttatttttattttttgagacagttctccctctattgcccaggctggagtgcagtggtgtaaacatagctccctgcagttgcaaattcctgggctcaagtgatccttccatctcagcctcccgagtagctgggactacaggtgtccaccaccatgcctggctaatgacctcttcttttgtagatacatcagctacatggaagcaggaaaccaaacaggatttttagagtttatccttctcggactctctgaggatccagaactacagccgttcatatttgggctgttcctgtccatgtacctggtgacggtgctgggaaacctgctcatcatcctggccatcagctctgactcccacctccacacccccatgtacttcttcctctccaacctgtcctgggttgacatctgtttcagcacttgcatcgtccccaagatgctggtgaacatccagaccgagaacaaagccatctcctacatggactgcctcacacaggtctatttctccatgttttttcctattctggacacgctactcctgaccgtgatggcctatgaccggtttgtggctgtctgccaccctctgcactatatgatcatcatgaacccccacctctgtggcctcctggtttttgtcacctggctcattggtgtcatgacatccctcctccatatttctctgatgatgcatctaatcttctgtaaagattttgaaattccacattttttctgcgaactgacgtacatcctccagctggcctgctctgataccttcctgaacagcacgttgatatactttatgacgggtgtgctgggcgtttttcccctccttgggatcattttctcttattcacgaattgcttcatccataaggaagatgtcctcatctgggggaaaacaaaaagcactttccacctgtgggtctcacctctccgtcgtttctttattttatgggacaggcattggggtccacttcacttctgcggtgactcactcttcccagaaaatctccgtggcctcggtgatgtacactgtggtcacccccatgttgaaccccttcatctacagcctgaggaacaaggatgtgaagggagccctggggagtctcctcagcagggcagcctcttgtttgtgatggatcccttggccccaggactaagaagttttgtgagcaccaatggcaaaaatgttttattttgaaattcttactctttaaaattaaaaacatttttttatactttgagagtacaaatgcagatttcttaacatgcatttgcataagggtgaagtctgagcttttggcgtaccaattacctgaatagtgaacataaggcacttttttttcttttttgagacggagtctcactctgtctcccaggctggagtgcagtggagtgatctcggctcactgcaacctccgcctcccgggttcaagtgattcttctgtctcagcctcctgagtagctgagattacaggtgtgtgccacccatgccttttagtagagacggggtttcaccatcttggccaggctggtctcgaactcctgaccttgtgatccacctgccttggcctctcaaagtgctgggattacaggtgtgagccaccacgcccggccaaggcagtttttaaactctcactcccctctcaccttttgcagtctccagtgtccattattctgttataatgcccatgcgtatacattgtttagctcccaattataagtgagatcatgcagcatttgactttgtttctttactaccttacttaagagaatggcttccagtcccatcgatgttgctgcaaaagacatgatttcatccttttttatggctgagtagtactccattgtatatatcctcgatatctatatagatatagacatatgtagatacataccatgttttctttttttaaaaaaatttatttttatgtcagtagtttttggggtacatgtggtttttcattacacggatgagttctttagtggtgacttctgagtttttagtgtacccgtcacccaagtggtagtagtctcttattcctcacccccctcccaacctttctcccttcaagtcaccaaagttcattatattgttcatatccctttgtgtcctcatagcttagctcccacttataactgagaacatacgatatgttcatatggatcttatgtatgttggttgaacatacaaacaagtccaggtttttcattcctgagttacttcacctagagtaatgacctccagttccatccaagttgctacaaaagacattatttggttcctttttatggataagtagtattccatgctgtacatataccacaatctttatcactcattggttgatgggcacttaggttggttccatgcctttgtaattgctaattatgttgctataaacatgcaggtgtatgtgtctttttcacataatgactttgtttcctttgggtagatacccagtagtggaactgctggactgaaaggtagttctacttttagttcttttttttgttttttttttaagacagagtctcactctgttgcccaggctggagtgcagtggcgcgatctcatctcactgcaacctccacctcccaggttcaagcgattctcctgcctcaacctcctgagtagctgggactacaggcacctgccaccccacccagctaattcttctatttttagtagagacagggtttcaccatgttggccaggctggtcttgaactcctgacctcaggtgatacgcccacctcggcctcccaaagtgctgggattacaggtgtgagccactgtgcctggccttctagttctttaagataccactttaaaaaaagtccagtcctccattgatggacacgtaggttgattccatatctttgctaatgtgaatagtgccgtgataaacatgggggtgtaagttaacaattaatctccaagtaatttccttgatggcacttctgtcctatgtgctattcaaaaattgtgtccttgatcatcgttcttaattctccattagtgagttctgaacttgggtttgaagcatttgctatagctttgttatctcaagtggtggcacagagttcttaagctattgattgttcactgactttatttctatgtgtttgcatgtgggtttttgttgtttgtgtgttcgatcatgaacagatcaacagtgtttatttgttttcctactggatgaagtatgattaaaatacgtatttaaatatagctggttatatctctctggtgtctcttcttcttctaagaatatcagtcctattagatcagggcctgacccttatgatttcagtaaactttaattacctccctgaggaccctgtatctaaagacagtcatcatattgggggtgaggacttcactatattaattttggggggtgcaatttagtccataagagatgtttatgcagatctgagaaagtttctgccaactctatggggagctctaaagctagggctgctctttggagaattctcacattgtgtagaaataaccaggccctattaccccaggaagcgtggggccttgagggtgatagggacagagggtggagaaattctaggcagaaaagggcagttcccaggcaaaaccccaccctcaagccaaaaagcctgaaactgcagcccaaagtgagaacttatatccctgttttctcgcttggatatcaccttttcctaaaccacccctgaccctgcccaaccccatgctatgcctataaaaaccccagactcagccagtagatgaaactatggctggacattagagagaagcagctttgacctcagaaggacagctcgatggtataacttcagagaagaatttggcaggagacgactggacttcattacctgcctgccccatcccttttccagcttcccttacctgagagccactttgatcagacataagatccctcctgcatttaacatccttcaattcgttcatgcaaccttatttttcctagatgctggaaaagtgctcaggagccacaagtgcggttacaaaagcctgtcatactggccctttgccctcgctggtggagggcagccacttcatgcaaaaaggcaaagggcccactgagctgttaacacttaacaccccaccctaatcttttattatgcagatggattctctatctggccggcgccatgttgcctgtgtctttactgcacatgggctgacaaagaaaaggaaagatggagactctatgctgaacgtgtctggctttcaagtagccctttcctattggcgcagctgctaggattcacccatgcaagcttgcagttgcttatctatgtctgcagcttgatttttcaggcttctctttgtcagaaaagaaatgatttgggggttgctttttgttagggaaattcctccaaggactcttttaccctcactctctgcctaaataatttctttctatctcctttatcaatatggctgagtctggggctgttatgggctcagaatgggggagggacagaccataggtattattcaaaaaggcaacattcgattggctaaaaggcatttttcaaaaaaaaaaaaatctgttgggaaagggcaagtaaacaagaacagaagttttcactctgggtcgcaggtttcatccaggacgagtagtccagtctttcagcctatagactgtttttggcttgaaggtggggttttaccggggacccaccccatctgcctgggtatttggctgtctcctgtcactatcacagagataacaagaacacaacaaagtaaagaaccacgacattcaaatggataatttttgaggaagccatgtcagtgcatgacatgaaaatgatttaaatgatgctttagaaatctcaagaacagctgaaagtaaactgatcaaagacagagatttgatgaccatgtacagagaagaaaactataaaagtaattaatcactgaaggagttgttgaatagaaatatacaaaaacatataaagcaattttataggtgctttaggaatgggaaacagaggcatgtcttttagagagagaaaaaaagagccagaatatttaaattcacatttgccttaggtagttgtaatatccaggaaacaggaggatgttccatctaacatcactgggattacaggcgtgagccaccgcatctaagaaatattactaatcatatcacagagtgtacacacaatgtgtacacttactgtgttgttagcagtaatagcgaagagatattatgagtcatgtcacagggtgtacatccactgtgatattaacattaatattgaagagatattatgaatcatataacagggtgtacaaccagtgttatattagcagtaatatcgaagagatgttatgaatcatatcacacggtgtacacccactgtgatattagcagtaaaatcgaagagatattttgaatcatatcacatggtgtatacccattgtgatattagcagtattatcaaagagatattatgaatcatatcctaggtgtacacccactgtgatattagcagtaatttctaagagatattattaattatatcacagggtgtacacccattctgatatttgcagtaatatcaaagagatattatttgcagtaatatcaaagagatattatttgcagtaatattgaagagatattatgaataatatcccagcatgtacacacagggtgtgtacagattaagaactgcagcccatcctctttgggctgttcctgtccatgtgcctggtcatggtgctggggaaccttctcatcatcctggccgtcagctctgactcccacctccacacccccacgtactttttcctctccaacctgtccttggctgacatcggtttcccctccaccactgtccccaagatgattgtggacatccagtctcacagcagagtcatctcctatgcgggctgcctgactcagatatctctttttgctgtttttggatgcatggaagacatgcttctgagtgtgatggcttatgaccggtttgtggccatctgtcaccctctggattatccagtcatcatgaacccatgtttctgtggcttcctggttttgttgtcttttttttctcagtcttttagacttccagctgcacaattggattgccttacaaattacctgcttcaaggatgtggaaattcccagtttcttctgtgacccttctcaactcccccaccttgcctgttgtgacaccttcaccaacaacatagtcatgtatttccttgctgccatacttggttttcttcccatctcggggatcttttctcttactataaaattgtttcctccattctgaaggtttcatcatcaggtgggaagtataaagccttctccacctgtggctctcacctgtcagttgtttgcttattttatggaacagcccttggagggtacctcagttcagacatgtcctcttatcccagaaagggtgcagtggcttcagtgatgtacacagtggtcgcccccatgctgaacccgttcatctacagcctgagaaaaagggacattaaaagtgccctgcagcagctgcatggcagaatagtctaatctcatgatcttattatcggttccattctttagcatgggttggaaaaggcagcaaggtcaaatatctagacctgcaaagaatatcgcttccttcgttatgtctctagttggaattgctgagtattctgatatcctttgttcttaataaacatcatgattgaattcaatatacctagacggactcttttagtttctgggcaatgaccctggtatccaggtgaaattacattctacttctttcttctttcttctcttcttctccttctccttctccttgttcttcttcttcttctttttcttcttcttttttgagatggattctcgctcttttgcccaggctggagtgcagtggtgtgatctcagttcactacaacctctgcctcccgggttcaagcaattctcctgcctcagcctcctgagtagctgggactacaggcacccaccaccatgcttggctaatttttgcagttttagtagagacggggtttcaccatgttggctaggctggtctcaaactcctgaccttgtgatccacctgcctcagcctcccaaagtgctgggattacaggcgtgagccaccgcacctggccacatctctcttcttgtatacagttaagtcctcacataatgttgataggttcttggaaactgtgactttaagaaaatgaattataggaggtcctcaaataatgtcatttcctttaacattgtttagctataaagttgttgagaaaaagaatctggtttcattatacatcatttttcttattgttgcagtttccaaaaatctattgaagaccttaaatgagaatttactgtacttcacatttatattgcttttcactgttcatttgtaatttatttacactttgcatctataaaatctatttaggcagattatatgtgaggatccatgtcactggtcctcaagtttgagttagattgaaattgcccagagagcttacaagtgctgatgcctgggtctcattaccagagattctgatttacttagacttgtgtgggtatgaggatattacaaacatcagagagagttcagatggtaaagttcccaaagggattaaactcaatgtaagttacaaaggagttttttgtaccaccaggcaatgtgatttcttcaaatgcattgccttcaacactgaaccgactgtcattatgctgggttattttcaccccttagaatttttattttatctactgcaactgtagttttacatgtatatagatttttatcatatttccttcttgtgcatacataaaaagagaaataggaaataataacatggtaacaatatccctagacttcccattcagagactggttctttaaaaatacgtgttatttttactttctaataaagaaaatgtggtgtatgcatatacaatgagatatgattcagctgtaaaacaaatggcatcttgtcatttgcaacaactttgatgggactgtaggtcattacgttaagtgaaatagggaaggcacaaaaatgcatgttctcattcatacgtaggagctgaaaagttaatctcatgaaggcagacagtagaatattggctaccagagcatggtaaaaatggggagggggttgaagagaagttggtatatgggtccaaaggtccatgcagaagaattaaattcgagtatttaatagtacagtagagaaattttagttaacaataatgtggaatatttcaaaatagcaaggagatacgatttgtgtggttcttattatgttggtctttaacctatagtatttctgttctgatgtcattcttctgtactcatcttttgccaggttgggactctcgaaaccctgttctatttcccatgtgggttttttgtttttgttgttgtttgtttgtttttgagacggagtcccactctgttgcccaggctggagtgcagtggcatgatctcagctcactgcaacctctgtcacccgagtttaagcaattctcctgcctcggcctcccaagtagctgggataacaggcacaggctaccatgcccagctaatttttgtatttttgtagaaatggggtttaaccatgttggccaggctgatctcaaactcctgacctcaagccaaccacccaccatggcctcccaaagtgttgggattgcaggcgtgagccaccgtacccagcccatgtagttttcttatgtaattccactcctggtcactaaggctcatcacactgaaagttcagtgtacttcactaacaccttcactccccgaagcctcagagtttagaggctaccttcagttactgtttctgttactacattgtttccttttgcctttgtcctgcagtaacaattgaaccaactccctatattcaattctcttcattaaaataactagattgacttctattcctgaactttgatttgggaacaaaggtatgttgtagttctctacaattggaatatttttaaatgtgctcaagaaataaagctggttataaaacacatgtctttgtgaagggcatctaactgaggtttaaatgctggttttctacttccagttgctatgtggctctactgatgtctgaggattattgaaccaccaatttcatcataaataatttaatcatgttcttctataactttatcctaagatattaaatgtatatgtcaccaataaaagtgagctcttcatttgtcacccaatagtcaacgaacatgataagtggtacattaatattgcctgttgaaatcacattgtagacgctccccataggtgatgctctgtcctttgctctttatgtcaagatttagaagagagctatgatgaactaataccttacatggcagaagtttggatgcttcagaatagccatctaagattactatgacaatctttgatttggacggaaattacagataatggaaaaaaatgtcagatttgtagctacttcatcagccatatattggctcttgaatttgggacctttggcagctcacagctcttttctgaacctcagattcctcagtagcaaattaagtacaatcattttttttccttccaagatcatgcaatgatcatatataatggtatcatgaaccagtaaaggtagttttccatcaaatatttttagtatatattattagtatatattattacataaaagaagtcaattttatgaaaatttccagaattcataagcaaattgttattgcagaattcataagcaaactgttattgcaaactgtgtaaccttgtatgcaatacaaaacatatttctattacactagttcacctaatactgtgataatggtctatctgagaggctggctggggagatataatgaaatatatctctaattagataactatttaataggtagtaatggaacaataaggccaaactgtcataatcaatgtattattgattagtgtattgttgaacatgtgttttattttttgttttatttttgagacggagtctcgctttgtcgcccaggctggagtgcagtggcacgatcttggctcactgcaagctccgcctcccaggttcacgccattctcttgcctcagcctcccgagtagctgggactacaggcgcccaccaccgcacctggctaattttttgcatttttagtagagacagggtttcaccatgttagccaggatggtctcgatctcctgaccttgtgatctgcccacctcggcctcccaaagtgctgggattacaggcgtgagccactgcgcctggcccaacatatgggttttaagggttgaagtttgattttcaacattagctcatctaagtcatttgctgactggaccagaacatatttattagctccacatcctctaattcatcatttttaatgatgttcagcttgaggaactctaggattaaacagataatgtatttacctgataagaaattagtaaatgtagatatcattgtcatcatctacacttagatcaatgcatttcaagtaaattatttgaactcctgttgttcattatcctggatggctgacggactgtctcttttttatatttacacaagggcagagaatgaatatcattatctatatactcacaaccttgcacagtgaggacagctctccttcatataacaatgaagtaattgtacactgacttatgagagtgaaggcaatttgatatctgttcaaaccatattttctttcctcactgaagccctattcctcttatacagagaactccttggaaacaaaacgtatggtttgttagtgtttgatcagaaccgttgaatgggatctagatttcttaaacagtatttacagataaagaatcacataagacttggaaccaacccaaatgtccatcaatgatagactggattaagaaaatgtggcacatatacagcatggtactatgcagccataaaaaaggatgagttcatgtcctttgtagggacatggatgaagctggaaaccatcattctcagcaaactatcgcaagaacaaaaaaccaaacaccgcatgttctcactcataggtgggaattgaacaatgagaacacttggacacaggaaggggaaaatcacacaccggggcctgttgtggggtggggggaggggaagggatagcattaggagatgtacctaatgtaaatgatgagttaacgggtgcagcacaccaacatggcacgtgtatacatatgtaacaaacctgaacgttgtgtacatgtaccctagaatttaaagtataaaaaaaaaatcacataagaaaagaaaggttttgaaagattctgcaaataatgaaggttaatacattaaaaagtgatggtagacattcttcagttgcacattaaaaaaaaactcagaaaatagtatcctcctgtttccattaagtggactcttcatgtgaggggaaattaggaaaagatgaaagaaaatgattcattctactgcacaaacataactcttttttttttttttttttaagatagagtctcactctgtcgcctatgttggagtgcactggtgcaatcttggctcactgcaacctccgcctcccaggttcaagagattctcctgcctcagcctcctgagtagctgggactacaggtgcgcaccaccacgcctggctaatttgtgtatttttagtagagacagggtttcaccatattggccaggctggtgtcgaactcctgacctcatgatctgcccacctcagacttccaaagtgctgggattacaggcctgagccactgcgcccagccaactctttggtttttatacaaaagtacataccttgaagacattatcatcactgaagtaaataaatcacagaaggataaacacaactgggctcagtggctcacaccagtaatcccagcactttgggaggctgaggcaggcggatcacttgaggtcaagggtttgagaccagcccggcgaacatggcgaaagctcgtctctactaaaaatacaaaaattagccagatatggtggcacatgcctgtaatcccagctacttgggagaatgagacaggagaattgcttgaacttgggaggcagaggttgcaatgagccaagatcacgccactgcactccagcctgagtgacagaatgagactctgtctcaaaaaaagataaacacagtatgattccactgatatcaaatatctagagtagttaaactcatagagttggaaaacagaatggtggccccaaggagtgggcgagagagaggaatggagagtttgttgaatgggcacagtttccattttgaaagataaaaatgttctggagatgatggtggtgatggttgctaaacaatacaaatgtacttaatgtcattaaactgtaaacttaaaaatagtggaaattgtttatattgacccttctatataaaataatatatatttatactttttaatatttacacatggtatattttaccacaataaaagatgaaaattgaagcatttggatctttacaaagaaaagaaaaaagtgaataatacacacaagctttctcctgattagaggaagagcccaaaagcttctatggacactcatttttctcttcttcttcctgaattattatgaggaagtccttagagattggggaacttgggccaatttggctaatgaggagctctgtgccttgagcccccaaggccatagcatagtgaatactcagcctgtgcctccagccctgcagtgtgagcttccagtccagtgggctccacacctgtcgtctgcatcaggaggctcatgtctgaccctgtcttcctgccagtcctgaggacggagcctgagcctccatcgtgcaccacgcagggaggacagcggacctgctctccatgatcatggcccagcagaggggaagcgcagctcagtgagtgctgagggatggtcgggagccttctttcctcatcctcaggacaaacaggacagtggagtggcagataggaggacatcaatgtgcaaaatatcagctcagacaactgtggagtttatgttcttgattgtggtggggactctgaaatctcactcaaagttttactttctccctccactggttctacttgctatagacatctcactgaagctaggaaaaaataggtctctctaagctattccatgaacactgtaaaaggattatgaagctgatgatgaggatgaggaggaagaggacagtcactatgacatcatgaacttttcctgagggcttcctgaatgccaggcgcccagttctgtgttctatgtggtttgtttcattttatctgcatagccttctgcaatccataagtgcacacattattattattttgcacgaggaaaggagctgtgcatttttatgtaacttgtagtatttcatgaagtagagaggagtaaagccatgtttgaatcaggccatctaaatccttgcacatggcatttggctaggcctcttcctgcatccaacctgccctctcgaatccctgtcactctggacccctggtgtgctcactgcttaccagtgggttcctggtagaccacagctagaccagtgggtgctacgttcactgtatcaagtatagaaagggcagctgagatcacatcaaagatcccagaaagaactggcacaggatccttcagggtgcatctctcccttgcccctgttcctggctttccttgcagctctccacctcctgaaaggagaaataaaatcagagttttggcctcattcctactcaggaatctggaaacagtttgaaaatgcacctccgatgtgcctgtggttaagacctcttacctctgcttacaactttctgatagctgggaaacataaaaaaggttcatgcctgagactcagagactgatcatttattaggttggtgacaacagtaatggcaaaaacctcaattacttttgcatcaacctataatttttttaaaatcctgttattccacttatctgtgtggcagggggcaagatgttagtgtttctgagactcaacattgccacctgagttgatttctagttgacacagatacattcagtattgattaagcagatcatgggggctccctgtgggatctatttgtgatggatgcataaagtaaaggcaacgtgtattctagaaattgttattaatattttaagattaatctttatatcactcaactgaaatatcctgtgacctgaagttactgtttctgtacttcccacaggacattttatttttgtccttatataattaagtactgattattgtgacagaaacaactgagtctctttcatctctaattctccagagtctctaacctgcttgacacagaggaggcatcagaaataaaaatctcttttaagagaaatgcaggtcaggcgcattggctcatgcctgtaatcccagcactttgggaggctgaggcgggtggatcacttgaggtcaggagtttgagaccagcctggccaacatggtgaaaccccatctctactgaaaatacaaaaattagctgggcatggtggtgggcacctgtaatcccagctactcaggaggctgaggcaggagaatcacttgaacctgggagacagaggttgcagtgaactgagatcgtgcctctgcactccagcctgggtgacagagcaagactccatctcaaaaaaaaaaaaagagagagagagaaatgcaaatcgaaactacaaggagatatcatctcaccccatttagaatggcttttatcaaaaagtcaggcaatagcaaatgctcacaaggatgtggagaaaggggaacaattgcacactgttggtgggaatgcaagttagtccatccattatggagaacgagttggagtttcctcaaaatactacaaatagagctaccataagatgcagcaattccgggccaggtgcggtggctcatgcctgtattctcagcactttaggaggccaaggcgggtggatcacgaggtcaggagatcgagaccatcctggctaacatggtgaaaccctgtctctactaaaaatacaaaaaattagccgagcgtggtggcgggcgccggtagtcccagctactcggaaggctgaggaaggagaatcgcttgacctgggaggcggaggttgcagtgagccaaggtcgcgccactgcactctagcctaggcgacagagcgagattccatctcaaaacaaacaaacaaacaaaagatacagcaattccattgctaagtatatacccccccataagggaatccatatattgaagagatatctgcactcccatgtttattacagcactagtcacaatagccatgatttggaagcagctaagcattcaccatccattcaacatatgaatggacaaagaaattgtgtacatgtgcacaatagagcattatgcagccataaaaaaggaagagatcctgtcatttgcaacaacttggatggaactgggggccatcaatttaaatgaaataagccaggcacagaaagataagcttcacgcgttctcacttatttgtgggatctaaaaattaaaacaatggaaatcatggagatagagagtagaaggatgattaccagaggctgggaaggggagtgggggtgaggggaaaagtgcaggatggttaagcaacacaaaagtatagttagagacaatgaatgagatctagtattaggtgactgtaatcaacaataatttattgtacattttaaaatagctaagagtaattggattgtttggcacaaggaaaggataaatgcatgaggtgatggataccccatttaccctgatgcgattattgtaccttgtatgcctgtgtcaaaatatctcatgtcattcataaatatatacacctgctatgtacccataatattttttaaaaagaaaatgatgtataattatgtgtgtaaatgtggatataactctacagaaatactgaatgaaaaagcaagttacagagtaatacctgctctatactttcgttgacataaaatttaagaaagcaaaattaaatgattcattacttagggatatatatatatatgagtagagtataaagaaagaagagattaactcaaatttcacattggaggttacctgtgccgtagggctggggtgcctggaaccatagaaggatgcacggcttcgaagattgtgctttttttttcttgtttgtttgttttgttttgtttttgtttgtttgttttttgaaagtgagtcttgctctgtcacccaggctggagtgcagtggtgcaatcttggctcactccaacctctgcctcctgagttcaaatgattctcataccttaccctcccaagtaggtgagattacaggtgtgtgccaccacgcccggctaatctttgtatttttagtagaggcggggtttcaccatgttagccaggctggtctcgaactcctgacctcaagtgatcagcccacctcggcctcccaaaatgctgggattacaggcatgagccatcgagcctggcccaaagattgttttttgttttgttttgttttttgagatggagtctcgctgtgtcacccaggctggagtggcacgatcttggctcactgcagcctccgcctcccaggttcaagtgattctcttgcctcagcctcccgggtagctggcattacaggcaggccctactgcgcctggctagtttttgtattagagacgaagtttcaccgtgtttgtcaggctggactcaaactcctgacctcaagtgatcctgagcctcagcctcctaaagtccttcgattacaggcatgagccaccacgcccggcccaaagattggttttattgcatttgttaaactgtgggataggtacttgggtatttcattattgttcttttttttttttaagtacatacatattatgtacattcccttgatttcttggaacatttcacaaaaaaattatatacacagaataaaataaatatttaaagccaaaaatctctggaaatactgagaaaaaaagagagaaagagacagaaagaagaggggaaggtaaacattattgcttagacagaaacacattttagactttcacatctttctagcctcacataaagtaatgcaaaagtgttcttaaaattgcattactcacgcctgtaatcccagaattttgggaggccgaggcgggcagatcatgaggtcaggagttcgagatcagcctgaccaacatgaaaccccgtctctactaaaaacacaaaaaattagccgggcatggtggcacccgcctgtaatcccaactactcaggaggctgaggcaagagaatctcttgagtctaggaggcggaggttgcagtgaaccaagattacgccactgcactctagcctgggcgacagagcaagactctatctcaagaaaaaaaacacttttattaatgctcaaacatccacaggtgccttgcgcactacagacaacttgtagtcactgatggctttgattatgcgcatttaactaaaccttatttatcaaaactctgagtccacctaagcaaggacaggagttgaatattaaatgaatttcaaaagaaaacccacatatttgagggagactttgcttccacaggaaagtgaagtcagaaaccatgaagacaatgaaaacactagaacagaactggaatgtgaaaatgtctgcttatgaactgtcaactttaatttatctttgaaataacgtggtcctaggtcttacagaatatttctaaatattgtaaatcaaaggaatttgtagcattgaattagaatgaaataaggcatatttgaatgtctttggtttcttttaattacaaagatttcttttcttaaatggggaaagatatttctttactttttgtgtgtgtgtgtaagacaaggtctcactctgtcatccagactggagtgcaatggtgtgaacttggctcactgtaacctccacctctgggctcaagtgatcctcccacctcagcctcccaagtagttgagaccataggcacatgccaccacgccagctaatttttgtatttttagtagagacggggttttgccatgttgtccaggctggtctcaaactcctcagcttaagtgatcctcccgccttggcttcccaaagtgctgggatgacaggcatgagccactgcgcctagccaatatttcttattttatatttttactgaaaagagtacgctgtattttaatgtgatcatgaattttctcaaatgttcttgctcttctcactttgttcagtcaagggtctctaaggtaagtgtctacagaatcaggtgactaacacaccaatcaattacaaaaggacttgtagcaaattgggttttacggacacaaagatgggaaaaacagtggggactgcttgatgggggagggtgggggtttatggggtggaagtctatctatccagtactaagcccactaccttggtgttgggatcattgctgcaccaaacctttaccgacacattatttactcatgtaacaagcctgcatatgtattctgtgagtctaaaataaaaaaaaagaaaattagggttttcaaaactgagaaatatggctgagggtatatgatcctcaaatgtgaaaacattaattgtaaattgcttgtatccaaaatatagacacagtgctgggtgctgattttgtcctttccttttttccaattctctttttctcaattgtgtccaagatacacagagccagagaatctcacaggtgtcttagaattcctgctcctgggactcccagatgatccagaactgcagcccgtcctctttgggctgttcctgtccatgtacctggtcatggtgctggggaacctgctcatcattctggccgtcagctctgactcccatctccacagccccatgtacttcttcctctccaacctgtccttggctgacatcggttttgcctctactactgtccccaagatgattgtggacatccaggctcatagtagactcatctcttacgtgggctgcctgactcagatgtcttttttgatctttttcgcatgtatggaaagtctgctcctgattgtgatggcctatgaccggttcgtggccatctgtcaccccctgcactaccaagtcatcatgagcccacgactctgtggcttcttagttttggtgtctttttttcttagccttttggactctcagctgcacaatttgattgtgttacaacttacctgcttcaacgatgtggaaatctctaatttttttctgtgacccttcttaacttctcaagctggcctgttctgacacctccattaataacatggttgtatattttattggtgccatatttggttttctccctctcttagggatccttttctcttactataaaattgtttcctccattctgagagttctctcttcaggtgggaagtataaagccttctccacctgcagctctcacctgtcagttgtttgcttactttatggaacagcccttggagggtacctcagttcagctgtgtccctttcctccaggaagggtgcagtggcctcagtaatgtacatggtggtcacccccatgctgaaccccttcatctacagcctgagaaacagggacattcaaagtgccctgcagaggctgcacggcagaataatgtaatctccttatctgttgcatcttttttgtagtattggttggaaaaggcagagctttgatacaaaatatcaagacctttaaatccttcccccttggttacattatatttattgcttgataggttcaattcctctccatgtttcatatgtgaatgtgggcggcaagccaccaggggccgaggcaagagaccgagggcacgagctgttccagcataataaagaaaatatataaaataagaatagttatactagatatagatcatagatatgattatatatgaacatcattaatcattagtttgtagcaattactctttagtccaatattaatcttcactctacaatcataacctaggaaaaaccaggccatacagagataggagctaaagggacatggtgagaactgaccagaagacaagtgtgagccctctgttatgcccggacagggccactagagggctccatggtctagcggtaacgccagtgcctgggaaggagccccgttaccttgcggatcttggtctagcagtagggtcagtgcctagaaaaagcactccttactcagctgaccgggaaaaggagtctctcttttcccgggggagtttagagaagactctactcctccacctcttgtggagggtctgacatcagtcaggcctgcctgcagttatgcggaggcctgtttccctgtgatgctgtgcttcagcggtcacgctcctgtttcacttttatgttccaccctgtacaactggctctgccttctagacagcagtagcagaattagtgaaagtactaaaagtctccgaaatgcagaaataatggtgtaagctgtcctctctctctccgcctcggctgccaaacagggaagggccccctgtccagtggacacgtgacttgtgtgaccttacctatcattggagatggctcacactccttaccctgcccccttgtcttgtatccgaaaaataacagtgcagccaggcatttgggccactaccggtctccgcgccttggtggtggtggtccccccgggcccagctgtcttttcttctctttgtcttgtgtctttatttctacaatctcttgtctccacacacggggagaaagacccacagaccctgtagggctggtccctacatgtgaatattgtttccattgttttgtctttaattggaatgtgaaggtattctggaattctttgtttattgcaaaaattcgtggctgaatccagtatacctggacagcctcctttagtttccgagcaatgaccctggtatctaggtgaaatcacaaccctgtttttatatataagaagtccttgcttaaagtcaatagcatcttggaaactgcaaccttaaggaaatgatatacagcaggtcctcaagtaaaattgttttgttcaaagtccattagttatattgttgataaggaaaaacacacggtttcattataaatcatttcacttaaatcacagtttccaaaaacatattgagggtgttaattgaggacttactgtatttcaaatttaagttaattttcacagttcgtgtggaaattatttacatattacatctgtaaaatcactttaagcaggctatgtgtgacgaacttgttcacgagccctcaaccttggcttttattgacctcacctggggagcttacaaatgatgatggctgggctctcttacccagagattttgatttacttgaacctgtgtgggtctgagaggttttaaaagcaccagtgatagttcagacgatgaagttcttcaagggatcaagctcaaatgggtaagctactaaagagctgattgcagcactagacaatgtaattttcttcaactgtcttcttcaaattcattatccttcagcaatatacagattgtcattatgctgggaatttttagtaagcacttggaatttgttgaaaatgttgatttatatacgtatagattttcttcggatttcactcttgtgcgtactgaaagggaaaatagaaaaggataacatggtaacaacatccctaaaacttcacatgctataactgatttttaaaaatttgtttagttttctttctttttttatgaagtgtggggtaggtacacaaagttatactattcagcctttaagaaatgaaagtgagtcatttgcagcaacatggatttaagtgaaataagccaggcatgaaaagacaaatatggcatgttcccactcatacctatgagctaaaacagtgaatcttgtgaaggtacaaggtagaatggtaattactagaggctggtaagggaaggaaggagtggagcatgaaaagatgtttacagggtacaaaaatgcagttagatagaagaaataagttccagcgtttcctaatacagtaggggaattctagttagtggtaattgattgcatatttcaaagtagctaggagagaagatttgtattgttctcattattctggtttctaagccattgtctttctgttcccttcccgcctttctctactcagctctttcatgctaggttggggctcttgaagttattgctctgttttccatctggtgttcttgttacagactttcatgaacactgaattttactacactgaaattcggtatactttgcgaccaccttctagtatacccctatgcctgcctcagtgtttagaggctgctgccttcagttactgtctctgttaccacattgtgtcctttagcctttgtcctgcagtaacaatcaagccaactccctctgttcaattctcttcataataagtagattagttattcaaaataactagattagtttctatttttttttttttttgagatggagtctccctctgtcacccaggctggagtgcggtggcatgatcccgactcactgcaacctccacctcccaggttcaagcaattctcctgactcagcctcccgcgtagctaggattacaaggaccgcccaccacgcctagctaatttttgtaattttagtggagacggggttttgccatgttggccaggctcgtctggaacttccgacctcaggtgatccacctgcctcggcctcccaaagtgctgggattacaggcatgagccgcgtgcccagccctggtttctattcctgacctaaccttgactgaggaacaaaagtatgttggagttgtctgcaaggggaatattttaaaaatgtgctgatgaaataaagctgcttttaaaacatatgtctttgtgaagagagtccaactgaagtttaagtggcagtgccctatttccggttgctgtgtgactctagtgatgtctagggattgttaaatcaccagtttcatcataaataatttcagggttttcttcttttactttacactgagctaccaaaagtccatgtcaccagcaaacatgaactctcctttatttcacataaatgatagtcaaagaatttgataagtgggacattaatgctgcctttttttttttttttttttgagacagagtcttgctctgttgcccaggctggaatgcaatggcatgatcttggttcactgcaacctccgcctcctgggctcaagtgattctcctgcctcagcctcccaagtagctgggactacaggcacacaccaccatgctcagctaatttttgtatttttagtagagatggggttttgccatgttgtccaggctggtctcgaactcctgacctcaagtgagccacccacctcggcctcccaaagtgctaggactacaggcgtgaggcactgtgcctggcctaatgctgctttttgatgtcacatggtggactctccccactggtaatgctttgttgttggcacttttattttaatatttagaagagtgctatgatggattaataccttgtgatgggaaatgtttggattgtttggatggttcacagtagccaaccaaaagcgatgtgacaaacttcaatcgggatagaatatacagatggtagaaaaaatgtgggatttatggacccttcatcactcatatattgggctcttaaacgtgggacttttgataactcagaggtcctttctgaaccccatgttcctcagcagcaaattaattgcagtagtcttttcttccaaggccatgcaatgattttatatcatggtgccattaaccagtcaaatgttagtttcccttgaaatgatagcccctattattacattgaggaagttaattttagggcctggcatggtggctcatacctgtaatcccagcactttgggaggctgatttggcaggaaagtttaaggcaggtgtttgagaccagacttggctacatagtgagaccctgtcactacatttttaaaaaatttaaaagaagttaattttaaatgggtattctcagaatatacaagtaactggatattacaaactgtgaccttgagtataaaacaaaacatttctttttttttttttttttaaagacagagtctcgctctgttgcccaggctggagtgcagtggcacaatctcatctcactgcaacctctgcctcccgggttcaagcaattctcctgcctcagcctcttgggtagctgggactgcaggtgtgtgccaccatgcccagctaatttttgcatttttattagagacagggtttcatcatattggtcaggctaatctcgaactcttgaccttgtgatccgcctgcctcagtctcccaaagtgctgggattacaggcgtgagccaccacacccaggtaaaacaaaacatatttctattgaacaagttcatctgtagagatgtgataacaactaagagtctgtttgaggagacatatcaaatgtactgattagaacactatttttgctactacccaaacattttaaaagctcccaactcccagcatcttccgatccaatctacctctacattcctgtcattttatcatttgtgccctcatatttacctcagtatttattgatacactgataaatagcatcctttcttccacattcaacttgttggaatatatatttacatttattatatcagtcattgacaaatattgttgagtacctcacctctgagccatgggtggaatgtgaaagtttataaagaaccataatatctggctgggcatggtggtctgtacctacaatctcaccactttgggaggctgaagcaggagggtcacttgagaccagaagttcaagaccagcctgggcaacatagcaagactccatctctacaaaaaaataaaataaaataaattacctggacatggtggcgcaggaggattacttgaggccaggaattcaaggctgcagtgagctatgactgagccgcttcactgcagcttgggcaacagagcaagacatctcaaaacaaaacaaaacaaaaactccataacttccatacaacctattttatctacttgaataaagacaggccaaaagaaagtacatttcattaaagaatttactaggtgatctcacacacacacacacacacacaacacacacaacacagagtctacactagggagttctccgcctgaagtgagatgagctctttcttgatgagcaacaatcagaagctgctgggaacacttgctgaatttaggtgcagaattgcagcagcttattgtgatgttgggctgagagcttgtggcgaaggagaaccagggtggcttattttgtctgaaggtccaggagaacattgttaagtctgtagaaatatccagtgcagaggaaagggcgacatgtccatgtgccagttctacagcatggaatttttctgacagtacaatgtcttgaatggtgaggaactctaccggaaggcagagggaaatctccatggtcttgggtgcttagagacccatgtcctggtagaaggataggcctggcctctgttgctctgtcccttgcttccctgcactgacagaactcagctggcatatgtgagctgccccatgagagtcccttgtggcaacaaactgaggggccttaggccattgtcctgcaagaacctaaaccctacaaacagccatgtgagtgagcttcacagcagatcctctccagtcagtccacgagatgactgcaaccctggctgacatctgattgcagtcttgttagatatggggaaatgcttaagcaatatataaagttaccaagttaggctgcaaagatcagcagtttctaacatgccaacatagatcaatcagacagaaagaattagggtcttatccaacttagcaaaaacataaattaccaatgcataaaatctcaaattacaggcaaggagtatagaaagtaaaatagaaagtcctccttagaaacataaatctgaacttcaagaatgaaagtagtggctgggtgtggtgggtcatgcctgtaatcccagcactttgggaggccgaggcgggtggatcacgaggtcaggagtttgagaccagcctggccagcatggtgaaaccccatctctactaaaaatacaaaagattagccgggcatggtggcgtgcgcctgtaatcccagcgccactgtgctctagcctgggcgacagagcaagactccatctcaaaaaaaaaaaaaaaaaaaaaaaggtgcaacatattcttctcatggaaggcctgcttcttctttatttacatggttcattcaatggatttgcagatatgactcccatttcattttaaaattaaaaaaaaatctgatgtggtttgtcactgtctctgaaacttggtggtgggaactcagaggacagaagaggttttaatgagaagaggaagccctgttccttcaatggtcattcacttttctcctcttctacttttatttttctttaaaaatgttttaaaacatttttaatttttgtgcgtagatagtagctgtatatatttatggggtagatgaaacgttttgatacaggaatgcaatgtgaaataaccacatcgtggagaatgaggtattcatccctcaactatttatctttagagttacaaacaatgcaattatactttctaagttattttgttttatttatttattttgttttatgttttagacagagtcttgctctgtcgcccaggctggagtgcagtggcacaatctcagctcactgcaacctctgccacctgagttttatttcaaagacaaatatttattgcaggtatttgaataaacagaaaatactggctaccaaatttgcaggatgcaaattaggattagtatgcattccaaatcagtgaaaaatgataatatcttttgataccatcaaaatgataatatctttatgatatagaatacaatggcccggaaatcaagagttggaacaagattggccctgcctaacatcacctgtagtgagacacctaaggggtttgtgctcccagattccacggctctgatttctgtgggcttatagggcttgtatttcaaagggatagcatgtcagactcattctggccagtatattactaggaaccatttgacccaaccagctttcaaatatagagtcataatttgaagttgaaaatcacattatcattctttgcttttgtgtttgtttttggtttgagacagggtcttgctctgtcacccaggctggattgcagtgccacgatcacagctcactacagcctcaaactcctaggctccagtgattctcctgcctcagccctccaagtagctgggaagacaggtgtgagccactgtgccccgaaaattttatatcactgtttttatggaaagtaggatggcaaagttagaagtgtgggcaaagtgtcagattgttaggatatactctacctccatctcagtctcctcctttgagaaatgcagtgaatgagacaaaatttctcacgaaatgttttcaggattgaataacatcagacatgtaaagcaacaagcactgtcctgatattgtaaacattttatacgactaatctatggttttcattttatttcctatccagaggacaagaaaaaactatactaaggtgaggaacatcaacattcaacaggataatttttgaggaaaccaggtcagcacttgatattgggagtgccatacacatcaaattagaagtctcagaaagagtggtaagaaaactgatcaaagatggaactttatgggaaacatctagggaagaaaagtcaaaaagggcttacagagggagtttttaggagaaactaacacaaaaacaaaagcaaaatcatagttgtttttgattaaaaaaaaaaagaaaagaaagaaacacattggccaggcacggtggctcacgcttgtaatcctagcactttgggaggctgaggcaggcagatcatgaggtcaggagttccagaccagcctgaacagtatggtggaaccctgtctctactaaaaatacaaaaattagctggctgtggtggcacacacctgtaatctcagctacttgagaggctgaggcaggagaaccgcttcaacctgggaggtagaggttgcagtgagccaagattgcaccactgcactctagcctgggcgacagagccagactctgtctcaaaaacaataacaataacaacaacaaacaacccaataacaacaaccaaaaatcccacatcaagcacattttttaaaagagaaaaagagccggatatttaaacccacaacatttgccttaggggtacgcagtgtgtcctcttagttctgaggccctgatttgtcatggacaagagtcggccctgctgaggagtctttccagggcccccttcacatccttgttcctcaggctgtagatgaaggggttcagcatgggggtgaccatggcgtacatcactgaggcggtggagctgctctgggaagaatgggtcacagcagaactcagatagaccccaagtcctgttccatagaacaaggagaccacacagaggtgagatccacaggtggaaaaggctttgtacttgcccttggtggaggacattcccattaaggaggagacaatctgagagtaggagaagaggatcccagctacaggaaacacacccagcagtgccgtggccacatacaagacaatgttattgaggagggtgttagagcaggccaccttgaggacctgagccggttcacagaagaaatgcggaatctcagtgcctgtggagaaggtcaacctcttcatcagtagaatatgaaccagggagaaccagaaaatgatgaaccaagatgccagaaccaggaggccacagaggcaggggttcatgatgaccgtgtagtgcagtgggtggcagatggccacaaaccggtcataggccatcacggccagtaggaaagtatccattccagcaaacatcattaaaaaatacacctgagtgaggcaccccatgtaggagatgtctttgctccgtgcctggatgctcactagcatcttggggactgtggtggagatgaaacagatgtcaacaaaggacaggttggagaggaagaagtacatgggggtgtggaggtgggagtcagagctgacggccagaatgatgagcaggttccccagcaccgtgaccaggtacatggacaggaacagcccaaagaggacgggctgcagttcaggatcatctgagagtcccaggaggagaaattttgataattctgtaaggttttctgcttccatgtagctgttgtgtctgctggggaaggaggaaaaagcaacgtttaatgaacagcaagtggcagctcagcttgtcatcactttacaatatcaccttttgatggacatttgtcacccttcctggagtccttacaaagacaatgaatctctcaggaagtggtatctatttttattctatttgtgtagagttatccagccattctttaatttttagaaatctctctctttggccgggcatggtggctcacgcctgtaatcccagcactttgggaggacaaggtgggcagatcacgaggtcaagagattgagaccatcctggccaatatggtgaaaccctgtctctactaaaaatacaaaaatcagctgggcgttgtggagtgcacctgtaatcccagttactaaggaggctgaggcaggagaatcgcttgaacccaggaggcggaggttgcagtgagccaagatcatggcactgcactccagcctggtgacaaagtgagactccgtctcaaaaaaaaaaaaaaaaaaaaaaaacctctttttttcatttactcaccagttttaattcccccatttgtatctatgaacttaaatcaatttcttctttggtgtgaatcttccaaaataattaaaggtatgtcatgtcttttcctcgataatccccatgcttccttcattctaatagatgtacaatagttattaagttgtggattttcaacccaaacaacctttattctgtgacccagtgcttggaagtgatgtgacagttaactctcagggctttcttccttccttaaaattaaattattgatattactttcttattgaggtttaaaaatgccatatgcacggtaggaatatcaacaaatgatagctatcattactgctactattactattaatcttattaatcttttccttttatgataattacttagatatataactcttccaaggtatagcatagagctgtgatttggaaaatattttctgaaatcagactttttagaataaaattctgatccatgcattagtctgttttcactctgctgataaagacatacctgagactgggcaatttacaacagaaagatgtttaatggacttacagttccacgtggctggggaagccttataatcacggtggaaggcaaggaggagcaagtcacatcttacatggatggtggcaggcaaagagagaaagcttgtgcaaggaaactcccccttatagaaccataagatctcatgagacttactcactatctcaagaacagcatgggaaagacctgtctccatgattcaatttcctcccactgggtccctcccattacacatgggaattcaagatgagatctgccaccccctgcaccccacagtcatcatgaactcctgcctctgtggcctccttgttctggcatcttgatttatcattttctgggtctccctggttcatgttcttctgatgaagaggttgaccttctctataggcactgaaattccacatttcttctgtgacctgcctctggttcactgtgtagggacacagccaaactatgtgaatccaccaacttactactgtataccatagagaaagttatttgaactgtcttagctgcagctacctcacctccatagtaggagtagtaaatactccctatgtgggaatattgaagagtgaaattaaatgagattatccatgtcatttgtctactatgatttctgtgtcatacaatggatatttcacacatatgaacttttgttcttttgcttttttttttgagacagagtctcactctgttgaccaggctggagtgcagtggtgcaatgttggctcactgcaacctctgcctcctgggttcaagtgattcttgtgcctcagcctcccaagtagctgggaccacaggcatgcaccaccatgcccagctaatttttctatttttagtagagatggggtttcaccatgttggccaggttggttttgaactcctgggctcaagtgatccacccaccttggcctcccaatgtgctgagattacaggcatgagccactgtgcccagcctgaacttttgtttttaacattacaataaatctgtctttcatggctatcatttatcaatatcaatatcccccttacatggggcagccatcaaggatggaattctgatcactgtgaatacaacaggtctgttacgtcttgtgaccaccacacaggactctcaactcatgaagatccctatgcttccctgcttcagagaatgtctgcccagtgtattcctccaagaagtaacaaaagcctgtggactacatacacaagatgagaaaagaaagggacaccgccattagaatcaaagacaaggcctgagagaatgtgtgcttgtgtacacatgcagttgagtgggaatgttggactaatatcagggcaatgaattgccaagaaatgtgactgataagtttgatataaaaatttaaaaatttctataaatcaaatcatcctaaaaaactaaagggcaactttgaggtttgaaaaaaaatttgcatttttcatgatggaaaaaaggttgttactatttatgcctagagaatgttgattaattaaagatggaaaaataatcactgaagaccaactttagtcctggaaagtggatagaagaggcttctctgagataggaaaatttgggctgagagaggaagaatggatcattggtttgtttgtttgtttgtttggagatggaatctcgatctgttgcccaggctggagtatagtggtgctatctctgttcactgcaacctctgcctcccaggttcaagcgattctcctgtctcagcctcctgagtagctgggattacaggtgtgtgccactacgctcagctaatttttttatttttagtagagacagggtttcaccttgttagccaggctggtctcgaactactgacctcaagtgatctgcccacctcggcctcccaaaatgctgggattacagacatgagctactgcacctggccggatcattgttaattaggggaagtaaggaaaggaaagggtaaatcttctaggctgacagaagagaattcgagattgtcccatgggtcattgagcttgtaaaggaagggatttgagatgccagtgagatggggagcagggaatgaaagcgggatatgtatttgatgactagaaatagaacatcctatattcttcctccttgtccctttcacattggtcaacttatatttagttttagacagtggttgcgattgttttgtctcatcatttaacaaggatttacgtggtgcccagcacattactgattctgagcaagtacaaattgaaatgttctataaagactgggaccaaagcatcaactataacacaaaatagaaatcttcaagtttaagacatgtttgaatatagacataaatttaataatacagtaaataacatattcatatctcttttaaaataatgataaatgaagtagtaataccagctctaacaatggaagcaggtttaatgtaagaatgtctgcataattcatcacaaaaacaggtcagtaaagagaaatcataaacaaaatcacaatagaaaaaatgcatttgaaaaagattatcaaccagggcagatcctctcaataaaggaagaaaccaaggacaattgcttaacccgataaacaatggttgttttaataccacaggcaacaagatatgctatgttaaaacagtaaggggtttaaattcctggatacaccaaaggccgtctactacaatttcaatcttttgatattttggtgaacatgcaaatggatttttttttgggggggacatggtgtcactttgtcacctgggctggagtgcggggtgcagtctcagcttactgcaacctctgcctcctgggttcaagcaattatcccatctcagtctcccgagtaactgggattgcaggtgtaagctaaggtgtcaggctttctttttttgttattgtttagtagagacagggttttgccatgttagccaggctggtctcagggtcctggcctcaagtgatctgcccgcctcggcctcccaaagtgctgggattatagatgtgagccactacgttcagccaagggatttttaatatgagaaaaaaaattggactgcatgttgaatgtcagaaataattgtattatttctatatgatatcatggatactaagttgaaatagcaaaaacataacagctagtaagtgctgtaaataagtcaccatctccaccacatcaaccctacccccaatccccagaccactctgggtctggtaaccaataatctgccaggaaaaatatagaatataatagaaaaatccaatcacattaggaacacatagacaataccttgagcatagtagatcttccgtgagtagttaatgaataagtaactggatgtacgaaattcaacaggagactaaagtttataggaaagagtgcaggagagttagagactgttcggaaaataacttattaaagacgggccctggattccaaggagtgagaacagaaggtgggagacactggtttctgtgaaaactaaagtaccatcaaagtacagggacttcaccttcatagactcaataagtatgggactttccaggctcattactgtgaaggctagtacttattctctctcctcttttccttcttaccccaccagccctcactgggtcacactaactctgatggttatcactgaagttttctcttctacacgatctgttcctaggaagccgtactgggttttttccaaaggctgggagcagagaattacaggtgaggttgtttaaacaggggcacattttaagtttccagtgtctcaagagttgaattctcagagcaccttattaaataaattgttctattttcttcccactctccaaagagtttggctccctttgagtagtaagaagatgatagaatggaaatttttcagttaattttgtgatgaaataggcagtggtagggcatgatggatttatttcccccaagaagaaattctttcttcggtttaatttgaaagtcacaagttttgccctaaggaaagattaatttctgcaaggaactaaactcaggaatcatctccaagcgatgtgactcccttgaagagtctttggagattttatggatccctcggtgttgaaaattcatggaaacaaaaatgtcttttctttttaaatattttttcaaattatttttatatatttttttaaattatagaattatatgtatgtatcatgtacaacttgatatttggaaatatatatacattgtggacattcaatgtatctaattaacatacgcattatctcacagagtcgttatcctggtgagaacacttaatatccactctcttagcattttcaaagaatatcatatatatcatcattaactaaagtcatcctgctgtacaatagatctcttgaacttacttctcttatatagctgtaattttgtattcttttactaacatctccacaacaccaacactactcctcaaccccaaaccactctgggtctggtaaccaacattctacttctttgaaatctggattctatttctctgagatcaccttcgttagattccacatatgagtgagatcatgtgatatttgtctttctgtgcctcccttatttcacttaacacaatgttctctgagttcatccatgttgcaaatgacaggatttccttgtgttttatggatgaatcatattccattgtgtatatatactacattttctttatccattcatttatttgcagacaactaggttgattctgtgtcttggctactgtgaataatgctccaataaacatgggagtgcgatatcccttccacacactgacttcgtttcttattgatatatacccagtagtggactgctggatcatatggtagttctatttttaagtttttgaggaacctccatactcttttccataatggttgtactaatttacattcctaccaacagtgtagaagggtttccatttcttcatatcctggccagcacttactatcttttgtctttttagtaatagccatttgagatgaagtgaggtgatatctcattgtggttttcatttgcatttccctgatgattagtgaagttaaaccttttaaaaatgtatgttgggccgggcgcagtggctcacgcctgtaatcccagcactttgggaggcctagacgggcggatcacagggtcaggcgatcgagaccatcctggctaaaggtgaaaccccgtccctactaaaaatacaaaaaattagccgggcgtggtggcgggcgcctgtagtcccagctacttgggaggctgaggcaggagaatgacttcaacccgggagggggagcttgcagtgagccgagatcgcgccactgcactccagcctgggtgacagagcgagactcgtctcaagaaaaaaaaaatgtatgttgtccatctgtgtgtcttcttttgacaaatgtctttcaggtcttttgcccttttttttttttttttttttttttttttgagacggagtctcgctctgtcacccaggctggaatgcagtggcgcgatctccgctcgctgcaagctccgcctcccgggtttacgccattctcctgcctcagcctcccgagtagctgggattacaggcgcctgccacgacgcccggctacttttttgtatttttagtagagacggggttatcaccgtgttagccagggtggtctcgatctcctgaccccgtgatccgctctcctctgcctctcaaagtgctgggattacaggcgtgagccaccgcgccaggctgtcttttgcccattttaaaattgggtcgttttcttcctactgagttgtttgagcttcttacgtattttggatattagccccatatcacatgtctagtttgcaaatattttcctccattctgtagtttgtctcttcactctactgtttcctttgctgtgtggagatttttagtttaatgtaattccatttgtctattgcttttgttgtctgtgcttcagaggtcatatccaaaaaaatcactgctcagaccactatcatgaggttttcctcttttgttattttctagcttttctattttaggttttacatttaagactttaatccattttgaatggattttcgtatatagtgtgaagtaaatacctaatttcattcttctctgcctggatatccagttttcccaacaccatttattaaagagactgtcctttcccccttgtgagtctttggcacctttgttgaaaatcagttggctataaatacatggatttatttctgtggttgatattttgttcagttggtctatgtatctagttttatgccagcaccatgctgttttggatattacagctttgtcaaatagttttaaatcaggtagtgtgatgcctccagctttgttattttggctcacattgctttagctatttggtgtctttagtgattccacaaaaattatttctgtgaaaaatgtttttacaattttgacagggtttgcattaaatctgtagattgctttggatagtatggacattttaatatagcaattcttccagttcatgaacatgggatatctttccatttatttgtatcttctttaatttctttcaacaatgttttatagttctgggtgtacaaatttttcacctcctcagttaaatttattcctaagcattctatttttgggggtaccaattataaataggattattttgttgatttcttttttgagtagtttgctgttagtatatagaaacactattgatttttatatgtcgattatgtatcctccaactttactgagtcttttttgttagttctaacagtttttggcagtcttcagagttttctatacataaggtcatgtcatctgcaaacagggaaaacttaacttcttactttccagtttggatgtcttttattttttttctctaacctaattgatttagctagaacttccactactatattgagtagaagtggtgagaacaggcattcctttcttgttctggaccctagataaaatgttttcaattgttccccattgagtgtgatgttagctgtgggtttcttgtgtgtggtttttactatgttgaggtatattccttctatatctaactcattgagtctttatcattaaaggatgttaatttttgtcaaatgtttttttctgcatctatagaaatggtcatatggcttttgttcttcattctgtgagtttgatgtttcttgttgtttaatttgcataatttgcaccatccttgtgaggataaactgctggtcttttcaagatagaaggagccccatgtggtcaacctgctcccctggctggctggtctcctcaagaaagaaggccctctgggtgttctgctattgtctcttgctgaccattcggacattccgaagcagcaccagctcaatggatctttgcaaatgggaggatcagcccttgtggccactctgtttatcaggccatcataccatcaggtggccaatgataaaggctggaaaatgttatgtggcaaaatgaatgcctatctgcctcctatgtgacatacaacacaaatattttcatttatcatatccagtcctctatgtccatctacatacctgtctacactgtttcatcattttctttcaaagcccatgaccaggtggtcccaccacctcaaatgactttttcttccagacaacgtggatgaccagatgtgccgcttgcagttccaccctttgcagagattttttctatacacccctttttcagggtgtccctgaacttggctataatgaagccatggctcattttttattgtactcacataccaagccaatctgtctataaagcaaactcaggcatttttctcttcttttttttttttttttttaatagtacaggacatctcctgctccccaatggaccctaggtacaagctaaaggcgtggtgttggtgcgataatggtgaatgccattgggatctgctggagtcttggctttttttttcagactgaatcttgctctgtggcatagactggagtgcagtggcacaatctcggctcactgcaacctctgcctcctgggttcaagcaattatcgtgcctccgcctcccgattagctgggataacaggtgtgtgccaccacacccagctaattttttgtatttttaatagagacagggtttcaccatgttagccaggatggtctcgatctcctgacctcgtgatccacctgcctcagcctcccaaagtgctgggattacaggtgtgagccactgcacccagccggggtctcggctttctacacgtgcagctttctcatgcctctggtcctgtttgggttcattctcagatgtgccatttccaccatggattggggctgggcctgtctaatgttacgacttagtagggcccatagaatcaggttatagtgggaaatttcatatatgtggtcattggtaccccgtcatcaagcatcccatatctacaggacttggtaacaaaccaggaactatttctcaaagacatataaatatttccagtggatggcatagcctcattctagaatccttaaaacctgatcatgattttcccactaagagattccatatggccaggcatggtggctcacacctgtaatcccagcactttgggaggctgaggccagtggatcacttgagcccaggagttcaagaccagcatggccaacaaggtgaaaccctgtctctactaaaaaataaaaaatacaaaaaattaactgagcatggtggtgcaagcctgtaatcctagctacttgggaggctgaggcaggagaatcacttgaactggggaggtggaggttgcagtgagccagaatcgtgccactgcacttcagcctgggcaatggagtgagacttggtcaaaacaaaaaaaaaaaagagagagagattccatagatgcactctgaattttgttcaccaatgaccttcaacaccatagatctagcagataatatggcccaagcataggggtgtatgatgtgagaagaggagattatgttggtatgtgggtgatccatttaaacacttatcagtagactttctctcaattttcacaatcaatggtcaaatgcaacagacatgacctgaaaaagaaatgacaaccaggacttggaatgcttagggatgaaggtcaaggtcaccccaccacctgaatcacccaacaacagaagtgttatacaaggagaggggaggtcgggtgcggtggcccatgtctgtaatcccagcacattgggagactgaggtgggcagatcacctgaggtcaggagttcaagaccagcctgaccaacatggggaaaccccatctctactaaaaaaaattagccagatgtgatggcacatgcctgtaatcccagctactcgggaggctgaggcaagagaactgcttgaacctgggaggcagaggttgcagtgagccaagatcacaccactgttctccagcctgggcaacaagagcgaaactcaagaaggaaagaaggaaggaaggaaggaggggaaggaagggaaggaggggaaggaagggaaggaagcgaaggaagaaagaaaagagagggagggagggagggaaggaaggaaggaaagaaggaaggaaggaataaaaaaacaacaaaaaggagaggggaattgaggatggtgacaagggagggggacactacctatatcagtgggaccttgagatgacaggcagcagcagaggctgctgtttgaaccactgaccctccttttgtaagtatttcatcctattggcctctcttccctaaaacgacacaaaggaaaccatggggaatgccactccttgaatgtacacaaaaagtttatccaaatggctgaaggagtggatggtcatggatgctgcgttgcattccttacttatccatttcagaatgaaggtcctgttcttcagggcataaggagtgtagccatatggcagcctgcagcctcaatccccttagagagttgctctcagctgaaggaggctgctttattcatggtggaaacactcatctctcttgctgtaggagcataactgacccagagccatctgtattcattactatgtttgtgccaagcttgctcctgggctgctcccatcacggctagaacacagcaaggcacctgtgcatgctccttcctgtgtccacaatgacattgatgacctgggtcaattactcctgccaggtgggagctcctctccttggcatgagagccctgaagtgctaggcagcagcatggcttgaagttcttagagacttctgccctttctctagaagggctaagccttgtttgaaatgcttgttccctggtaccataaagaaatagcacttgaatataaatttaatttcctcagccaggccatttttatactttctgcagaaagggtacactcgccagcagttttgccacgagagtatactgaacaaaggagacaaggtcatttataacctgatgtgtccaccctactgctgggtccggtttccactggctggaacgggaccgcacattccgtgtttgtcctgattggctagcaacttagaactttttaaaagaggcaaaggcagaggagaacaaaggaaggagaaagtaacttgtggaatgttgagaaaggtaaaaacaccttcaaataaggaagaggaacaggctatgacctaatgcttgcttggaccagtataagcatgccagggcaaatatttaggctaaattgtgagagctaaaaacataaagtacattgatttctttattacggctagcagatatttaagaatgttagcacaggtctttgaataaattttgcttctaagggaagttactatttattcccaattagacaaggaggaaagtctttgaagaggaacctctacttacttttacagcctttagaagccaagacctctaaatctgcagaagtcagacttgagaacagaagcacaaagtccccaagtggctccctgagaggaacatcaggcagggacccttctactttccacccttgattttttttaactttatcttaagctcaggggtacaagtgcaggtttgtcacataggtaaactgggtcataggggtttgttgtacagattatttgatcacctggctattaagcctagtacccattagttatttttcctgatcctcttactcctcccaccctccatcctctgaaaggcctcagtgtgtgtagttcccctctctgtgtccatgtgttcccatcatttagctttcacctataagtgagaacatgcggtatttgcttttctgttcctgcattactttgctaaggataatggcctccagctccatccatgtccctacaaaggacattgatctcattctttctcttttttttttttttccagagtcctgctctgtcaccaggtgggagtgcagtggcacgatctcggctcactgcaacctctgcctcctgggttcaagctattctcctgcctcagcctccggaggaactgggactacaggcatgagccaccaagctcagctaatttttgtatttttagtagagacggggtttcgccacgttggccaggctggtctcaatttcttgacctcgtgatccacacgccttgggctcccaaagtgctgggattacagacttgagccgccatgcctgcctgatatcattcttttttatggctgcatagtattccatggtgtatatgtaccacattttctttatccagtctatcactgatggacatttaggttggttctatacctttgctattgtaaatattgctgcagtgaacatatacatccatgtgtctttatatactaatgatatatattcctctgggtatatacccagtaatgggattgctgggtagaatggtatttcttttttttttttttttttttttgagacggagtctcgctctgtcgcccaggctggagtgcagtggcgggatctcggctcactgcaagctccgcctcccgggttcatgccattctcctgcctcagcctcccaagtagctgggactacaggcgcccgccactacgcccggctaattttttgtatttttagtagagacggggtttcaccgttttagccgggatggtctcgatctcctgacctcgtgatccgcccgcctcggcctcccaaagtgctgggattacaggcgtgagccacagcgcccggccagaatggtatttctgtctttaggtctgtgaggaatcatcacactgtcttccataacgaatgaactaatttatacctccaccgacagtgtataagcattcctttttctccacaacctcaccagcatctgttattttttgactttttaataatagccattctcactgtccacccttgagttttggacccatggattttatatattggggatgtagcacattatgatttttctttgtcttatggtgtatattacatcctgccaattttgtagtcagtatctgtgtattcaaatacctacattaattattttcattctctttgaaattaaacacattcccctattgtccagttaaaaacatttttcaaaatactctcccatactccatgcccccgttaggctacactttctctcttctctccgcttccctaaaaacttcatagttggtgtacatttgccacctatatttcctctagacacactcttcacctactccatatgggctattactgtcctacccttctatttagaggtaataaatgaagcccttcctaaaatcaacaaaggcttccatgtcaccagaaaatgtcaaaaactattgttcagtcctcattttgttggttctttcaccaggacaaaacctactcaccaatttgctttccttcaggaaggactactttggagtagatggtgaatgccagggactgaaaaggggagaaaatggggagatgctggttaaaccacaaagggttctagtgatgcaagattaataagttgtggatatgtcctatacaatacagtgcttgtagatatcaataatgtattatttagaaaaatgtgcttaaaggcagacgttatgttatgtgtggttatcacacattaaaatattaaagccagttgaaactttaagaggtgatgggtatgtccctcgccgtaatggtggtgatggtttcaaggatgtatgcctgtttcaaaactcatcatgtgtatacattaaatgtctacagcttttacattttaatcatacttcaataaagtggttaaaacataaggaaagtaaatttaaaaaaaagatccctttgcctctataaccttgtggacaccaagggatccataaaatctccaaagtttcttcaagggaggcacattccagagagaagattgctgagttttggttccttatagaaattaaactttcctgccagggatggtggctcatgcctgtaattccagcactttgggaggctgaggcgggtggatcaccggaggtcaggagttcgagaccagcctggccaatatggtgaaaccccatctctactaaaaaaaaactacaaaaattagccgggcgtggtggcaggtgcctgtaatcccagctactcaggagactgaggcaggagaatcacttgaacctgggaggcagaggttgcagtgagccaagatcacaccactgcactccagcctgggcgacagagcaagattctgtctcaaaaaaaaaaagaaagaaagaaaagaaaaaaagaaattaaactttccttagggaataccttgtgacttttaaatccaactaaagaaagagtttctccttggagaaaataaattcatctcccactaccgctgcaaaattgcctgaacattttccattctgctatcttctttgtatcctaagggagctgaattatttggagggtggaaaaacaatagaacaatttatttaatgaggctctctgagagttcaacccttgaggcaatggaaacttcgaactgggccctgccacccctcaagtgtaattctctgatcccagccttggaaaaaacacaattgggtttaacagggacacaccatggagaagagaaagcatcagtgacaatcagagtcagtgtgacccaacaagggctgctggggtaagaggagagagagtgggtactgggctgtacctttagagtaataagcctagacagtcccatatttatttagtctatgaagctgaagttcctgtatttttttttttttttgagacagaattttgctcttattacccaagctggagtgcaatggcacgatctcggctcagcacaacctccgcctcttgggttcaagcgattctcctgcctcagcctcctgagtagctgggattacaggcaggcgccactacgcctggctaatttttgtgtttttagtagagacggggtttctccatgttgctcaggctggtctcgaactcctaacctcaggtgatccccctgctttggcctcccaaagtgctgagattacaggtgtgagccaccgcgcccagccttgaagttcctgtattttaaaggtactttagttttcaccaataccagtcttttgtagcccttgttctgttccttttctttccttctggaagctgaagcctctttccgggaacagttaggaatgtccatacttgaatgtatgattttctgatgatctccaaatcctctccactctctgccataaactgtaggttcctggtaggtttcctgaatccaatcacctcttcctgaatgactcactgaagatctgtcctacgcaaggtattgtctattttgtttctaatatgattggattttcttttataattttactatgttgctggcagatctgacttcaaatattactaaagaattctatatcattgttgttgtcattactattttttcacttcagtgtccacagtgccatgtaaaaaataatattatttttgacatttgaaactcgggccaatttcctttatttcatttttaccaatgtctttaaatgttcaggagactctcagacgattgatgctgagtagactgccttggcctattcatgaatttaagaggaatgctgtagtgtttatttattgattgattgattgagatggagtcttgctctgtggcccaggctagagtacaatgacatgatctcgcctcacagcaacctccgcctccgccttcaagtgattctcttgtctcagcctcccaggtaactgggattacaggcttgcaccaccatgaccagctaatttttgtatttttagtatttttattagaaatggggtttcaccatcttggccaggcttgtctcaaactcctgacctcaagtgatctgcccacctcagcctcccaaagtgctgggattattacaggtgtcagccaccactcccggcctgagaaatgctatagtgttttaatatggactatgctgttggctgtggtttcctttactaggttaaattgtccttggtggccgggcatggtggctcatgcctgtaatcccagcactttgggaggccaaggcgggtggatcatgaggtcacgagattgagaccatcctggccgacatggtgaaaccccatctctactaaaaatacaaaaattagctgggcatggtggcgcatgcctgtagtcccagctacttgggaggctgcggcaggagaatcgcttgaacctgcgaggtggaggttgcagtgagccgagattgcgccactgcgctccagcctaggcaatagagcaagactctgtctcaaaaacaaaagcaacaacaacaaaaattgtccttggtttcctcatgtcctgagagtctctgcactggctgctgtttgattttctgaaatatattattttgcattgtgtttgtggttaaggttttttttttattgacctattattgtgatgaactatgtaaacaaacatcctaatattaagcctgtttgctattaataggagtcttacatgttcacggtgtatgattcttttaaaataaacagaaacgtattttatttaactttactgttcaatttagtgtctatattcaggcatgaaatgaataaaaatttctgttttgtgttatggatgtcagttttgatctcaatctttattacacatccaaaatcgtgtttcttgaacacctactaatgatacaggagctaaaaagaaattacttaggcagctagtgagggtaagagagtccttggcaagggtttccattttaacaaaaagcatcccccaaaatcatttcttttttaacaaagagcagcctgaaaaaatcaagctgcagacatagaaaagcgggctgcaagcttgcacgggtgaatgctggcagctgtgccaatgggaaaaggctacctgggggccaggcgtgttcaacatggaggctccatcttccttttgtcaaccttgtgtgcattaaaaagcaggctatatggccgggctcggtggctcacgcctgtaatcccagcactttgggaggccgaggtggacggatcacgaggtcaggagatagagaccatcctggccaacatggtgaaaccccgtgtctactaaaaatacaaaaattagccaggcgtggtggtgtgcgcctgtagtcccagctattcaggaggctgaggcaggagaatcacttgaacctgggaggcggaggttgcagtgagccaagatcgcgccactgcactgcagcctgggcagcaagagcgaaactccgtcgcaaaaaaaaaaaaaaaaaaaaaagattcttcgtgcactttgtaaacggcacacctggtccaaccagtcctttgtgccctgtgtaaatcagacaccacctcctcaagcttatctataaaatcccatgcatttcacaatggaactggaagacccactcggcagcgcctcggagagagcttttctctttctctcatctatgaaacctccgctgttaaacccaatccttgtttgtctgtgtccttgatttccttggcgtgaggcagcgaacctcaggtattaccccaaacgaatgacactgcttccactaagtgacgggtaccatgtacacctctggaaagaaaaatgatgaaagaaaacacaacctcagatccacaaataaacgtaaaattacctacatgagatgcactcatgtagaaagagcacaggatggtctcttgtggggctcacgctctgacccccctaaccctcactctccactctccatctcactggtctctcaagtcccaattactaagctctctgagtcacgtgcaaccaggcatttcatcctcccagcctacgctgtctattctttccttgcttccccttttgaatcatgacccaatcttcttctcttagctccaagattcctatttcagaacccaacttcctagactaaattcgtcttctatgatgtttttctggtctttgattagttaaatatctctaggcatcagtatcactgccgtttttctaccatggtaaatgtaatcatttattttcaaatcttaaatttgccttttctttttctaggatgacatgatttatgtaagttttgaatattttgaaccaaatccatgaattatatatgttgatgatcgactctactgaccttagtacactgcaaccccactggaaagcacgtacacacgagaacagactcacacgtgacttgtgttttattttaatggctgtgtgcttttgtttcctcctcttatatatgtagtccacatgcttttttctcttcttggaagaatcacctggcaggcattctgaaggaaggagtcacaggaatcttcattaattagaagtgttgtatggcagtcaaagaggtaacagttctattcatcttcaccagaattccatccttgatggtcagcacagtttgagatggatattaagaaatgacactcatgcaaggcagattattgtgatgttaagaacggaagctcacatttatgatatggccgttgtatgccacagaaaccagagcagaaaaacaacatggatcatctcatttaatttcactcttcaatccgtccatgcagaaaatatttactactcttatttagaggtgaattatctgcagctaagagggtttacatgtctttcttttttttttttttgatatagagtctcactctgtcacccaggctggagtgcagtggcacgatatcagctccctgcaacctccgcctcccaggttcaagcaattctcctgcctcagcctcccaagtagctgggactacaggtgcgcaccaccacgcctggcaattttttgtatatttagtagagacggggtttcaccatgttggccaggctggtctcgaactcctgacctcgtgatccgctcacctcggcctcccaaggtggtgggattacaggcgtgagccactgtgcctggccacatgtctttcttaaggtcacacaatagtaagttggtggaccaaaattctattccagaaaatctccctcaagattccatttcctaaattacacctatgtattgtaccttggaagagtgatatatccaaaataactatcttataagaagaaggagtttaataatatcgacagctatcatttactgagactcttattgtacacaaagccacttttaaaacctcacaaagtgatactgacaatcatatttttagaaagaaaaaaataaacgtacacttagataaaaggtatatgttcttttgatcaagagcaaagtagcattactatagttaacaacattgtattgcatatttcaaagtaactagaaaagaggacgtgaattgttcccaacacatagaaaggataaatactgaaggtggtagacacctcagataccctgatgtgattattatgtattctatgcatgtaagaaaatatcacatgtcccccataaatgagtaaaacatgaggtatccatgaaaactaaggaactgagaattaactgtcacatcacctgtgtcaggtcacagaaaaaaagattgcctgagttgaaaatgcgtatcttaatcatgattatacacctattagcatgaaggaactatggagatgtatcaaaagacatggcgagtctgcagttatgtggaaggatcctatcaaagaagaaattactgtccataggtttgaatcaaataattaaaactcaggagtatatggtaaaggagaaagattactgctaaattaaaggtagtttgagaaactccgcacgtttcaaatggaattaggctaccaaatggctgagtgaatcaggatctttggaaggactccatagaagttgcatccaagggtgatattgaagagtgattgaatgttgctttttcctccttccccagtagacacaacagctacatggaagcagaaaaccttacagaattatcagaattcctcctcttaggactctcagatgatcctgaactgcagcccgtcctctttgggctgttcctgtccatgtacctggtcatggtgctggggaacctactcatcatcctggccgtcagctctgactcccacctccacagccccatgtaattcttcctctccaacttgtcctttgtggacacctgtttcatctgcaccacagtccccaagatgctagtgaacatccaggcacggagcaaagacatctcctacatggggtgcctcactcaggtgtatttttaaatgatgtttgctggaatggatactttcctactggctgtgatagcctatgaccggtttgtggccatctgccacccactgcagtacatggtcatcataaacccccatctctgtggcctcctggttctggcatcttggttcatcattttctggttctccctggttcatattctactgatgaagaggctgaccttctccacaggcactgagattccgcatttcttctgtgaactggctcaggtcctcaaggtggcccgctctgatgctctcctcattaacattgtcttgtatgtggccatggcactgctgggtgtgtttcctgtagctgggatcctcttctcctactctcagattgtctcctccttaatgagaatgtcctccaccgagggcaagtacaaagccttttccacctgtggatctcacctctgtgtggtctccttgttctatggaacaggacttggggtctatctcagttctgctgtgacccattcttcccagagcagctccatggcctcagtgatgtacgccatggtcacccccatgctgaaccccttcatctacagcctgaggaacaaggatgtgaagggggccctggggagactccttagcagggcagcctcttgtctcttacggtacacaacctcagaactaagaggatgctatgggtcccttaagcaaatgtgaatgcgcatatcctagatcttgctctcccctaaaatatatgttgcagtttcctattttcaaagcacctacgactttgcttaaaatgtttttgtatggccgggcacggtggcttacacctgtaatcgcagcactttgggaggcagaggcgggcagatcatgaggtcaagagatcgagaccatcctggccaacaggtgaaaccctgtctctaccaaaaacacaaaaattagctgggcgtggtggcacacgcctgtagtcccagctgctttggaggctgaggcaggagaatcgcttgaacccaggaggcggaggtttcagtgagccgaggtagcaccactgcactccagtctgggtgacagagcgagactctgtctgaaaaaaaagaaaaaaaaggtttttgtattaggttggtgcaaaagtcattgcagttttgccatcaaaagtaatggccaaaactgcaatgacttttgcacccacctaatatatttctgctgaagagctctctcagtaattccttttaaagttttcttctctgcacatagtccttaaagttccatctttgatccatttttttagtgccattcctgagatttctaacttgacattataaaactcttcatgtcaaatgctgacacgcgtcctcgaaaatgatccatttgaatgttactgtttcatcttaatttgattttgctcgttatccctggaagaaataaaatgaaattcataaaatattcaaagcaaagtacttaccatatcaaaactctgcttactagtttacatctataaactatttcatcctaaaaacctttctttgagttattttctctcattcactctatttctcagaggaagagattgagttgaggtcggctatatcaggcagtgtgacactgcagccccactactaactttgctgacccgaatttcataaaaatactcaggagcttttcaagttgaaagctgggatctagattcacaggctggttcattcataaaattcatagagattagtgcttcggagtaccctgagctgttgcttcattccttgtgattcttgcttttgtccttcttacttctcttttcccttctatccttcctcctttctcccttctttatcttagtctctccctccttcctttccttgttcctctaggtttttttaaaatttatttatttatttatttatttatttttgagacggagtctcgctctgtcccccaggctggagtgcagtggcacgatctcggctcactgcaagctccgcctcccgggttcatgccattctcttgcctcagcctcctgagtagctgggactacaggcgccccccaccacgcctgggtaattttttgtattttttttttagtagagacggggtttcaccacgttagccaggatggtctcgatctcctgaccttgtgatccatccgcctcagcctcccaaagtgctgggattacaggcatgagccaccgcgcccggcctagattgttttatttgttaatgttaatttccttcgttcctttttatggtggagcaatattccactagatgtgcagactgcaaagtgtttattcactcatccattgatggacaaggggtgatttccatctttgggctactgtaaatagtgctgccatgaacatgcatgtaaatttgtttgtttggttcttagtttccatcagttggggaagataactagcagtgggacttctgggtcctatggtaattatatgtttaactttttgagcaagtgacaaactgagttttatagaagctggcacattgaacatttccagcaatgtataaagttctagtatctccacatccttgccaatacttttttaaaaaaacaactgtagccagccaggtgtggtggttcatgcctgtaatcccagcactttgggaggctgaggtgggtggatcacttgaggccaggagtttgaaaccagcctggccaacatggcgaaatcccatctctaataaaacaaaaattaaccaggcatggtggcatacgcctgtaatcccagctacttgggaggcagaggcacgagaatgcttgaagctgggaggcagaggttgcagtgagccaagattgcatcactgtgacagagcaagtgacagcctgggtgacagagcaagactctgtctcaaaaaaacaaaaataaacaaaaaaacaatgaagtggtgtctcattgtgctcttgatttccattttcctaatgattcattgagcatctttccacatgcttgttggcagtttgtatatctgctatgaatcaatgtcttttcacatctttgctcactttgtaattgtgcagtttgtacttttgtttctcacctgtaagaattcctcatatattcagaatactcgacccttatcagatatatgcttgccaaatattccccacccatttgtatgttatctttccgttttttgaagtatacaatttgttattaactatattcatcataaagtgtaaatagatctcttaaaatcacttcccctgtctcactgaaactttgtgtcttttgactatgatctacccaatcccctcacttcacagcctctggtaacctcaatttactctgtttttatgagtttgacttgttttcatctacctgcatgtgagttcatgcagtatttgtcaagccgtgcgtggtttatttcacttaccagaaagtcctgcaggttcatccatgtggtagtaagtgacaggtttttccttctttgtaaaggctaaatagtattccattgtgcagatagaatacatttctttatatttctgatgatgagtccttaggttgattccatttcttggctatggtgatgaatgctgccatgaaaacagaaatgcagatatctctcaacatactgctttcatataaactcagtagtgggattgctggatcctaaggtagttctattttcaattttagaaggaaccttcatactgttttccataatgcagcactaatttatattccaaccaacagtatgcaatgtcccttttctccacatacccaacatttttacaattcaactttttttttttttgagatggagtcttgctctgttgcccaggctggagtgcagtgatgcaatcttggctcactgcaagctccccctccttggttcacaccattctccttcctcagcctcccgagtagctgggactacaggcacccgccaccatgcctggcaaatattttttgtattttttagtagagacggggcttcaccgtgttagccaggatggtcttgatctcctgaccccgtgatccatccaccttggcctcccaaagtgctgggattacaggctgagccaccgcacatggccaacagttcaacttcttgataacagcattctaacacgtacaaggtgatatgtcattgaggtttgaatttgcattcctgaagatttgtgaagctgagtgttttttcatatacctgttaatttgcatgccttctttctagtaatgtctattcagatcctttgtctattttccaatcaggttgttttctcacaattgagttgcatttcatacagtcttaatattctttctttttctttttctttttttttttttttttttgagttggagtctcgctctgttgcccaggctggagtgcagtggtgcaatctgggctcactgcaacctccgcctcccagcttcaagcaattctcctgtctcagcctcctgagtagctgggattacaggcacatgccacagtgcccggcaaatttttgtatttttaatagagatggggtttcaccatattggtcaggctggtctcgaactgacctcaagtgatacacccgccttggcctcccaaagtgctgggattacaggcatgagccactgtgcctggcctgaatattccctcttgaataggtcgttttttcttttttaaaatttagtcgagatggggtctccctaggtggcccagtctggtctcaaactcctgggctcaagtgatcctcctgccttggcctctccaaagtgctgggtttacaggcctgagccaccacaccaggccccctctttaattttgcaattgtattctcccattccataggatgtctcttcactctatagattgtttcttttgctgtgtgggaactttttagcctgatgcaatctcatttttctgtttttgcctttgttgcttgtgttttgggttcttatccaaaaaatcattgcccagtgtaatttcatggaggattattcctatgttttcttttagtggttttgcattttcaggtttactgagacctgagatgaggagctaatttcattcctctgcatgtggttttccagttttcccagcaccatttatggaagagactgtcctttccccactgtgtgttctcggcatctttgtcaaaaaatgatttgccataaattcattgattcatttctgcaccacctcttctgttccattgtcctttgtatctgtgtttctattggtaccatgctccattttcttaacagaacattttgatagagaaaagttttaaaatttgatgaagttcaatatatctatttttttgttttgttactcatgctttcactgttgtatctaacaatctgcttccaaataaagtgtaatcaagatattcctgtatgtttttttctaagagttttatgattttagctacattatatttaagctattgactttttatttatttatttattttgagacacagtctctctctgtcacccaggctggagtgcagaggtgtgatctcggctctctgcaacctctgcctcccgggttcaagtgattctcctgcctcagcctcccaggtagctgggattacaggtgcccgccaccacgcctggctaatttttgtatttttgatggagatggggtttcacatgttagtcaggccggtcttgaactcctgacctcaagtgatccacccgcctcggccacccaaatgctgggattacaggcatgagccattgcgccaggcctgttgatctgttttttatttgatttgatttttgtacatggcagaaagtagggttcaatctactttcctttgcatcgagtttgttcttggaagggtttagtttgttgtgctgtgaaacaccttattaataacatccacttggcagcagaatgtgttagcctagggttcaatctgtctaagtggtggttgtcagagagatcattgggtttataaaaaggtcacaaaggcaagattatgtttgacagagccctgctcatgaacattcagttcctcagcagaccagcctcttgtccatgacagatcaaggtctcagaactaagtggatgttgtaggtccattaggcaaatgtgaatttaaatatcccggctcgaccaggcttggtggctcatgcttgtaatcccagcactttgggggctgaggtgggtggatcacttgaggtcacgagttcaagaccagcctggccaatgtggtgaaaccccatctctgctaaaaatgcaaaattagctgggtgtggtggtgggtgcctgtaatctcagctacttgggagactgaggcaggagaattgcttgaatctgggaggtagaggttgcagtgagctgagattgcgccattgcattccagcctgggcgacagagtgagactttgtctcaaaaacaacaactacaaaactaaaagaaaacaagaaataaatatcctggctctttttctcctgaaaatcacatgcttcatttttactcttcccaaaacacttgtgatttggcttttgctacatgtttttactttaggttctctcagtaactcccttggtaatttccttctaacttttccgttttatatacagtctttaaagttccatctttggtccattttcttagagccactcttgagagttctcacgtgttgtttgaaacacttatcatatcgagtgctgatatgatgacatgctttcctcaaaaattacccatttgcatgttagcacccttcacctaaacttggttgtgttcttgtttcctctggaagaaattggatgaaaatcatacaatagtcaaggcaacgtgtttcccttttaggattgtgcttgttgctttacatgtatggctttatttaatcctgaaaacatttctttctttttgtttttgttttgttttgttttgagacacagtttcactctgtcacccaggctggagtgccatggcgctatctcagcccacggcaaccacctcccgggttcaagcaattcttgtgtctcagcctcccaagtagctggaattataagtgtgcaccaccacacctggctaattttttttgtatttttagtagagatggggttttgccatgttggccaggctgatctcaaactcctgacctcaagtgatccacctgcctcggcctcccaaagtgctgggattataggcatgagccaccacagttggccctgaaaacatttctttgacatgtcttttctcattcaccttgttccacaaaggaagaagcagatagaggtgaactataacctggcaacttgacgttgagaccacactccaactttgctatcctttatttcataagaacagtgatgtgatttttcacatcaaattaggaatgtagatttgtaagcttgtttgttctgatgattcatagtaatgaactgcctagaataactgagacgttgcttccttctttgtgattattccttttcttccctccctccctccttttttactttcttcctttcctcttctttcttccctcattccctcctctttcttccctcattccctcctctttcttctctcattccctccttccttcttgtctttctttctttccttctttatttgacctttatttcccataattgcagttttatgatctaaccccagattgtagaacatgtaataattatacgatagaaaagatttgttctctcatatagtttaattttcttctgagactttctggagatgtcttcaggaatggaagccacagaatgtggactgtgtttgggatgcagttcacccttttgatgagaactggtagaactgggtctgcagtgaaggatggggtagtagatggtgtcagggttcatcccacatccctaagaccctcccgccatctccacacacaccatcctgtctgccaatggtcagcatcagctgagggatccactttccccaatgcatggtggcagaaaggtaatgaatgcttacaattttatgttgctctggcatttttttttttttttttgagccagtgtctcacagtattgtgcaggctggagtacagtggctcactgaaatcttgaactcctgggctcaagtgatcctcctcagtctcccaagtagctgggactacaggcatgcatcatcacacccagttagggggtctctctatgtgactcaggcttgtcttgaaatcctggcctcaaaccaggattggccaccttggcttcctgaagcactgggattgtaggtgtgaaccactgcacctggcaggcatctattttgaatacaggcttagctttctgatgctagaggcagggttccattgcctttgacacagtttccaattccacaccaccctcaaatggctcaagctggtgcaattgttgctccttgcatcatcctttgaaagtgcaagttgtaaaagtttatggattcacctcagagggtttatctgagaagttgcctcaagcagttagaagatacagcttcctgatgcaacttcagctgcagagaccagggaaggaggggaggccttagaggcctgagacttctgctggcatccttctcaccaggctgcctcctcccgggagagtccctccttcagccccagtccctgtgcaggagcctggtttctggaaaaggccccacagcctggtggacacagacccaattccagtatcagacccatcagtgaccactgtgttgggattcaacagcctctccagactgtgattctcactggcaaaataaaaaatctgtctgtctttatttgatcaggagtactaaggctccaatgagacagtgtatttgaaaaaccttgggaatccactctccaaagcctagcaggttttgttactattatccaactcaatgtacaattctaaggtaaattgaaaaaatgtataaatccattaaaaagaaaagttgaaggtctcacatttcctggtttccaaataaactacaaagatccaggaattaaaacagtgtggtactataatacataaagacacatatacagaaaaatggaagagtaaagagagcccagaaagaaactctcacttatatggtcacatgattttccacatgggtgccaagaacattcattgggaaaaagacagccttttcaacaaacggtgtaggaaaaacttgatttcaaaatgcagaagaatgaaggtgggttcttaccttacaccatatgcaaaagttaacacaaaatggatcaaaggcctaaacctaaattccaaacctataaaattcttaaagaaaacattgatcaataccttcatgacattggatttggtaatgatttgatcaataccttcatgacactggatttcttagtgatttcttgaatatgtcaccaaaagcacagacaacaatatatagataacttggactacatcaaaattaaaaaacctttgtaactcaaaggatatactatcatcagagtcaaaagttaacccagggaataggaaaatatatctgtaaatcatatatatatgcttagaggctaacaaccaaacaatattaagaactcctacaactcagcaaccaaacaaatgcccattaaaaatgggcagaaggccaggtgtggtggcttacacctataatcccagcactctgggaggccaaggcgggcagatcacctgaggtcaggagttcaagaccagcctggccaacatggtgaaactccgtttctagtaaaaatacaaaaaaatacaaaaaaaattagcgggcgggtggcctgcacctatagtcccagctactcaggaggctgagtcacgagaatcgcttgaacccgggtggtgaagtttgcagtgagccaagatcatgccactgcattccagcctgggtgacagagcaagactccgtctcaataaagaaaaaaaaaaattgggcagaggacttgaatagacatttctctaaagaacatatgcaaatggccaatgagcatacaaaatgatacccagcatcactcatcaataggggcatgcaaataaaaatcacaatgagataccacccaataggatggctattaagaacaaacaagcaaaaaaacctgtcgagttttggtgaaactgtagggaaggaggaatgcttacacagggctatggaaatgtaaaatggtgcagcagtatgaaaatccatatgatggttcctcataaaatgaaaaatagaactaccataggatgctgcaagttcacttctgggtgcatacttaaaaggatcgaaaacagggatttgaacagatatttgtataaccatgtgtggaggaaaagttaaatattaaattcgaactcaattgaacatggacacaaacaatggtcagcaagtcctcgaatgggtcgtgtgagccccttgaggcgttcatccagcgctgtttcggagaaatctctatttcaatctattcctatacattagttattgaaaaacaatagacaatcacgaaaacgagttgacctttttgcgttccttgggcccagtcgtgaagggccctcgtgactgggcctcatgccaaacaactcattacaaaaagagttagggtcccagactgcgccaaagcttcaggagacctctccttgtctgtgcacggactggtggctgactctggagcccagactgttgctggtgaatccttcatagtctggtgagtgtgtatatatatatttttttttcgcttcggcgacttcccgttgcaatttgcttattatatcaatgtgcttttttttttttttttttttttttttttttatggagtcttgctctgtctcccaggctggagtgcagtggcgcgatctcagctcactgcaacctccgcctcccaggttcaagcgattcttccgcttcagtctcccaagtagctgggattacaggcacgggccaccacacccttctaatttttgtatttttagtagagacagggtttcaccgtgttagccaggatggtctcgatctcctgacctcgtgatctgcctgccttggcctcccaaagtgctgggattacaggcatgagccaccgcgccgggcctcaatttgcttattatagtaatttgcttattatatcatttgcttattatatctacattgccatttacgtgggataaagcttatttacccttaaaggtattgtgtgtgtgtgtgtgtgtgtgtgtgtgtgtgtgtgtgtgtgtgtgtgttttcttctccccttgtgcgtttcctgcacagaacaccatgtttatagcagcgttattcacaatagctaaatatatggaagcgacacaagcgtccaccaacagatgactggagaaacacaatgagatccatccatacaatggaatatttttcagctttaaacaggaaggcacttctgacacatgatacaacagggatgaatctagacaacattatgctcagtgaaagaaaccaatcaccaaagggcaaatacagactgattctatttatgtcaagtattttgtgcagttagatttgtagaaacagtaatcagaatggtggttgctagtggttagcgagttgaaggaaaggattttgtttaatggttgctgagtttttgttttgtaggatagaaaagttctggagatggatggtgaggatggttgtacaacattgtgaatctacttcatgccactgagctatatactttaaaatgatgaaaatgataaaatgttgtatttaccattttatataaaaccatttatatgtataattttaacatttatatgcaatatcttttatataataaaaaggaaaataaaaagtagacagatcttaataaaaaataaatgaaagaagtgaatagtacactcaggattcctcctgagtggaggaagagcccaaaagcttctgtggacattcatttcctcttcttcttcctctgttaatatggggcagtccttagagactggggaacatggaccagtttggctaatgaggagctctgtgccttgagcccccaaggccctagaatagtaaatactcagcctatgcctccagccctgcagtgtgagcttccagtccagtgggctccacacctgtcgtctgcatcaggaggctcatgtctgaccctgtcttcctgccagtcctgaggacggagcctgagcctccatcgtgcaccacacagggaggacagcggacctactctccatggtcatggcccagcagaggggaagcgcagctcagtgagtgctgagggacggttgggagccttgtttcctcatcctcagcacaaacaggacagtggggtggcagatgggaggacaccaatgtgcaaaatgtcagctcagacgactgtggagtttatgttcggggtttattttcagggtttatgttcagggttgtgtgtgtggtctttcatttcatattgctgcactattttacatttccatactcccttacaagcattcctacttctctatggtttcaccaaaacttgacaggttgttttgttcatttgctcttaatagccatcctattgggtggtatctcattgtgttttttatttgcatgtccctgccaatgagtgatgttgaatatcactttgtatgctcattggctgtttgtatatgttctttagagaaatgattattgaagtcctctgcccacttttaatggggtatttgttttgttgttgagttgtaggagttcttggtgtagtttctttgttagcctcttagcatatagatgatttgcaaatatattttcctattccctgggttaacttttgactctgatgaaattttacattcctcccatgctgattgaacttcccatagacatctcacccaggatagcaaaaagtgggtccctctaaactgtgccctaaacacaacaaaaagtttataaaggtgatgttgaggatgaggaggaagatgccagtcaccatgacatcatgaattcttactgagggcttcctaaatgcatggatctcagctctgtgttttgtatagcttgtttcatttcatcttcataatttttcctgagttatagctgcacacattattattattattgtacagaggaggaaaggagcaatgcatttttatatagctcgtaccagatcatgaggtagaaagaggtgaagccacatttgcaccaggcagtctaagtccagacacatagcatttggccaggcctctctctgcatccaaccttccccccctcgaatccgtgtcacacccagcaggtgcccctgctaactgtacccttccctttggggcttcctggtagaccacagctagaccagtgggtgccacgttcactgtgtcaagtatagaaagggcagctgagatcacatcaaagatcccagaaagaactggcacaggatcactcagggcgcatctctcccttgcccctgtttctggctttccttgcagctctctacttcctcaaaggagaaataaaatcagggtcttggaatccatttctattcaggaaaccggaaatagtttcaaaatgcgcttcagatgcacctgtgcttaagacctctggccattgcttaaaactttctgagagctgggaaacaatgaagaagtttagtgccagagactcaaagaccaaccatttaattccaaatcctgcccatgcccctgatctgtgtgacaaggggtgagatgtctgtgtctctgaggctcaacactatcatctgagttgatttctggtagatcccactgcagtgagcaatgattaaacagaccgtgtgtgctcctgtgtgatccctatgtgatggatgcataaagtgaagtgtattctacatgttttctattaatattccaaggttaatctccataccattgaactgaaatatccaggaacctagctatggttcccaatgtctctgacaggacatttaatttttgcccttatataagtaagtactgaggattgtgagaggaatatttgagtttctttcaactctgatttcccagagcctgtatcttgcttggtacagaggagacaccaaaaattagaatctctgttacatattgaatagacccttccttagttcacaaaactggctgtgatcagtgtgacttcaacacactcactgctttcctatctgtactttcattccttccaggaatgtgtcacaaactaggcagaaggtaaaatagcacttttttgtgtctatattatggacacataataatagcatctacaacattcaattacttaaagaccatggcagagatttttacaggcataaaaaaagagaaaaggatgcagaaggaagtgggggcaggtaaaccttattgtttagatcaagatacattttagagtttcacatgattccagccacaacgaaagtaatgccaaagtattttaacattaccttggccaggcacagtggctcacacctgtaatcccagcactttgaaaggcagaggtgggcagattacttgaggtcagaagtttgagaccagcctggccaacatggtgaaactccatctctactaaaaatacaaaaatcagctgtgcatggtggggcgtgcgcctgtagtcccagctactcgggaagctgaggcataagaatcgcttgaacccaggaggcggaggctgcagtgagctgagatcatgccactgcattccagcctggtgacaggctcaaaacttcgagactcaggtcttaaaaaaaaaaattaaaagcattttaacattatattaatgttctgtcatccacaggtacgttgcacactatcaacatctttgctatcagtgatgtcctggtaattatgtgcatttaactaaaccttccttttaattacttattgatttaatagtcaaggtctcactctgccactctgcctagagtgcggtggtatgatcatggttcagtgcagcctcgaactccagggctcaagcgattctcctgactcagcctcctgagtagctgggactacagggcggcgccaccatgcctgtctaattttttagttttttgtaaagatggggttttgctgtgttttccaggccggtcttaaactcacatcctcaagcaatcctcctgccttggcctcccaaagtgctaggattccaggtgtgagccaccaccctgggctactttcttatcaaaactccaagtccacctaaggcaaggacaggaattataattaagtgaattttaaaagaaagcccacatatttgagtgagtacttacttccatgaagaatgaaagtcagaaaacgtaagaatgatggaaaccgtagaatataactggtatgtaaagatgttttctggctatgaactatgaactttcattgagttttgagacaacatgatcctagatctcattgagtgttgataaatatcctcaatcaatggaatttgtagaattgtattagaataaaacaagacatagctgactccttcttagtatcctttcaatggatttaatctttttcttaaaggggcaagaatatttttgttgtatattttttcctgataaattaggctatattttaccgtgatcatggatttctaaaatctctaatgtttttgctctcctaacattcttcaatagactgtctctaagttaagtgtatacagaaagaggtgaataacacaaaatcaattatgaagtaactctaaggaaattgggtttgtcacaactgagaactattgctgagggtgtataatcctatgtgaaaacttaatttcttaattgcttgtatccaaaatatagacacagtgctagatgctggtttacttatgtcctattttccaattctctttttttttttcctcaaaaggtgtccgagctacacagagccacagaatctcacaggtgtctcagaattcctcctcctgggactctcagaggatccagaactgcagccggtcctcgctgggctgttcctgtccatgtacctggtcacggtgctggggaacctgctcatcatcctggctgtcagctctgactcccacctccacacccccatgtacttcttcctctccaacctgtccttggctgacatcggtttcacctccaccacggtccccaagatgattgtggacatgcaaactcacagcagagtcatctcctatgaaggctgcctgactcagatgtctttttttgtcctttttgcatgtatggatgacatgctcctgagtgtgatggcctatgaccggtttgtggccatctgtcaccccctgcactaccgaatcatcatgaacccacgcctctgtggcttcttaatcttgttgtctttttttattagtcttttggactcccagttgcacaatttgattatgttacagctcacctgcttcaaggatgtggacatttctaatttcttctgtgacccttctcaactcctccaccttaggtgttccgacaccttcatcaatgaaatggtcatatatttcatgggtgccatatttggctgtctccctatctcagggatccttttctcttactataaaattgtttcccccattctgagagttccaacatcagatgggaagtataaagccttctccacctgtggctctcacctggcagttgtttgcttattttatggaacagggcttgtagggtacctcagttcagctgtgttaccatcccccaggaagagtatggtggcttcagtgatgtacactgtggtcacccccatgctgaaccccttcatctacagcctgaggaacaaggacattcaaagtgccctgtgcaggctgcatggcagaatcatcaaatctcatcatctccatcctttttgttatatgggatagaaatggcagcaaaatttaacacctaggcctgcaaattctgcctccttggtcacattattttggttgcttgatggctttcattcctctctgggtttcgtatgtgaatattgcttgctttgttttgtctttaattgcaatgggtgagtattctggtatcctttgttcatcatacacatcatgaatgattccaatatacctagacagcctcctttagtatctgtgcaatgaccttgatatccaggtgcaatcacaatcttttctgatagacttgaaatcctcacttaactttgtcaagaggtttttggaaactgcaactttaaaaaaaaagcgcagcaggtcctgaaataagttcattttgttcaatgttgtttagttttaattttggtgagaaatgaataaattggtttcatggttcatcgttttgcttgaattgtggtttctaattttctgtggaggatgttaagtgaggacttatcgtacttcgtatttacctccctttctacagttcctgtgtaatttctgtccaaatcgcatctaggaaatcactttaggcagcttacgtatgatgatgtctatcaatggtcctcacatttggttttattgaaatcacctggggacctcacaaatactgaggcctgggtgtcattaccaaaatttacttggacctgtgtgggttgaggaattttaaaagcaccagaaatagttcaggtgatgatgtttctaaagggacggagctacaatgggtaagttacaaaagaatgtagcaccaggcaacgtgattcattcaaatatcttcttaaaacgcattattgttcagcactgtagaaatttacattatggccgggcgcggtggctcacacctgtaatcccaatactttgggaggctgaggtgggcagatcgcctgaggtcaggagttggagtccagcctggacaacatagtgaaaccccatctttactaaaaatacaaaaattagccaggcatggtggtgcgtgcctataatcccagctcctcgggaggctgaggcaggagaatcacttgaatccaggaggcagaggttgcagtgggctgagatagtgccattgcaccacagcctgggctacagagggagactccatctcaaaaaaaaaaaaaaaaaaaggaaaaaaggaaaagaaaaagaaagaaagaaattaacattatgttgtttttttaccactataatttttattgtacatttattcagcatatatttatacacatacagttttttctcctctttcactcttgtgcatacatagaaagggaaatagaaaagaataacatggtaacagtatcactgtagcttcacattcagagactaatttttgaaatttgctatagttttagtttttataaacaaaatgtgatatatatatatacacacaatggaatataattcaaccataaaatgcgtcacatcctgtcatttgcagcagcgtaaatggaaagtgaaataagccaggcacagaacaataagtattgcatattctcactcatgtgtaagagctagcatgtgagtcccatggcattagagagaagagtggtggttaccagaggctgagaagggtgtgtgagtgggtgtgggggatgaagagagtttggttaatggacacaaacatacaatgagatagaaggaataagttctaatatttggtagcacagtagggtaagtatagttaaaaataatttattatatatttcttttttttttgagttttgcttagtcacccaggctggaatgcaggggcatgatctcagctcactgcaacctccacctcctgggttcaaccgattctcctgcctcagcctcctgagtagctgggattacaggcgccagcctccacgcccagctaatttttgtatttttagtagagaggacgtttcaccctgttggccaggctggtctcaaactcctgacctcaagtgacccatccgccttggcctcccgaagtgctgagattacaggtgtgagccaccttgcccatttcttacatatttcaaaatagccagaagagatttgaaatatttccaagaaaaagaaattataaatgtttggagtgatggatattctaaatatccataattacacattgcatgcttatatcaaaataccacgtgtactctataaatatatgcaattattacatatcaataaaaaattgatggctattttaaatggaacttttgaaaattaaattataactgttttagtgtatagaaatagagtttttttttttggcataaagaacttcatggctgggcgcggtgatcatgaggtcaagagattgagaccatcctggtcaacatggtgaaacccaatctctactaaaaatacaaaaattagctacacgtggtggtgcttgcctgtaatcccagctactcgggaggctgaggcaggagaatcacttagacccgggaggctgaggttgcagtgagccgagatcgtgccactgcactccagcctgagcgacagagctagactccgtctcaaacaaaacaaaacaaaacaaaaaaaacttcatgcagtcacgcaatatacccatgtaacttaaattcagcctaaagttgtctccttacgttttttttttttttttttttgagacggagtctcgctctgtcgcccaggctggaggacagtggcccgatctccgcccactgcaagctccgcctctccggttcacaccattctcctgcctcagcctcccgagtagctgggactacaggcgcctgccaccacgcccggctaattttttgtatttttagtagagacggggtttcaccgtgttagccaggatggtctcgatctcctaacctcgcgatccgcccaccttgacctcccaaagtgctgggattacaggcgtgagccaccgcgccctgccctccttacgtattttaagttcagcctgaaagtttctccatgcatatgaactgtaacctacctggatgtttaaacagattgtaccctatgcctgagccaattacctgtttttgagccatcaaagctggccagcctttcaaaccgtattcaaattcgtcgaacgccgagaggtaacccatccagctgtttgtgtacttcacttccattcttttgtacgtcacttttctttttctgtccataaattttcttcccctaaatggctgtactggagcctctctgaacctattctggttgggggttacccgatttgcgaatcggtatttgctcaattaaactctattaaatttgacccggcgtgggggctcatgcctgtaatcccagcgctttgggaggccaaggcgggtggatcacttgaggtcaggagttcaagaccagcctggccaacatggtgaatccccgtctctactaaaaatacaaaaaaaaaaaaattagccggatgtggtggtgggcacctgtaatcccagctactcaggaggctgaggcaggggaatcgcttgaactcaggaggtggagtttgcagtgagccgagatgacagacaccactgcactccagcctgggggacgaaaccagactctgtctcaaaaaaagaataaaaaataaaacaaaaaaacccctctattaaatttaatttgtctaaggcttttcttgtaacacaacaaaactgcacatgtactttctgaatctaaaataaaataaaatggccgggcatggtggctcacgcctgtaatcccagcactttgggaggctgaggcaggcagaccacttgaggtcaggagttcgagaccagcctggtcaacagctcctaatgtcacaggggtgtacacactgtaatattattcacaatatcctaaagggatgttactactaatgtcacaatgcatgttcaccctatgatattatctgtaatatcctagggggatgttactgctaatgtcacagggggtgtataccttgtaatattatttgtaatatcctagaaaaatgttactcctcatgtcacagggggtatacactctatgatattattcataatatcctagggcgacattgctcctgttgtcacagtgggtgtacgccccgtgatattactcataatatcccaggaaaatgttactcctaatatcacttagggggtgtacgcaatgtcacaggggatgtacaccatgtgtactcctaatgttacttctaatgtcacttggggtgtacagaatgtcacagggggtgtactcctaatgtcataggcaatgtactcctaatgtcatagggaatgtactcctaatgtcacagggggtgtacacaatgtcacagggggtgtaaattgtcacagggtgtgtacattgtcacaggcggtgtacacaatgtcacagggtgtgtacaccatgtgtacacaatatcacagggagtgtacaccatgtgtacaccatgtcgcagggactgtataccatgtgtgcacactccctgtgatattattcataatattctatggggatgttacttctaatattaaatgtgatattcaccatcactattctagaaggatgttacttctaacatcacagggtgtgtacaccatatgtgtacacaccctgtgatattacacataatatcttagagggatgcttcttttaatttcacagggtgtgcacaccatgtgtacacaccctgtgatattattcataatagcctagggggatgttactcctaatgtcacaaaggaagtatcccatttatgtacaagtcctgtgatattattcctaatatcctagggggatgttgcttctaatatcacatggagtgtacagcatctgcgtacaccttctgtgatattattcataatatcctatagggatgttacccctaatgacataaaatgtgtacaccatgtgtgtaaaccacctgtgatattactcataatattctagtgggatattaattttaatgtacacaaagggtgtacaaaatgtcactggctgtacatcttgtgatattatttgtaatatcttaaaaggatgttactcctaatgtcacaggtggtgtaaattccttggtattatttgtaatctcctaggaagatattacttccaacatcacagtagaagtatgtacatggtacaccctctgaattgtttgtaatatcttagggagatataattcctaatatcacagtgggtgtaccccatgtgtgtataccctgtgatattattcataatctccagggtaaatattacttgtaatataacagagagtgtacactctgtgatactgttcataatattttaggaacatattgcttctaatatcacagtgggtatacacaatgtgtgtacactctattataatattccttatattttaggaatataaatgtcacagtggctgcacacgatattattcataatatccttggagtgtgttactattaatatcacagtggttgtacactctgtgatattattctttttatactagggggatgttactcctaatgtcacagggggtgtacgccctgtgatattatttgtaatatcctattggaatgttactactaatgtcacaatgcatgtacaccctgtgatattagttgtaatatcctagggggatgttactcctaatgtcacaggttgtgcttgccctgtgatattatttgtaatattctaggcgtatgttactcctaatgtcatagtgggtgtacactctttaatattattcataatatcctacggggatgttactccgaatgtcacagagtgtgtacaccctgtgatattatttgtaatatcctaggaagatgttaatcctaatgtcacagggggtgtacaccatgtctgtaaaccttctgtaatattctacagggatgttactcataatattacagggggtgttcaccatgtgtgtacaccccctatgatattattcataatatcctagaaggatgttacacctgatgtcacagggggtaaacaccatgtgtgtacacaccctgtgatattattcataatatcttagggggatgttactcctaattttacagaatgtgtaaaccatgtgtatccacctcctgtgatattatttgtaatatcctaggggggtgttacttctactgtcacagggtgagtacatcatgtgtgtacaaccactgtgatattatttttaatatcctagggggatattgttcctaatgtcacatggaatgtgcaccatgtgtctacaccttctgtaatattattcgtaatatcctaggaagatgttaatctttatgccacagggggtgtacaccatgtgtgtataccccttgtgttattatttccaatatcctagtgggatgttacttttaatgtcacaaagggtgtacaccttgtgatattactcataatatcctagaaaaacgttactcttaatgttacaggaagtgtaaccctttgaaattattcataatattctagggtgatattactttaaatatcacagcgggtgtacatacaccatgtgtctacacccttgatattattcataatatccagggtacatattttttctaatatcaatgagggtgtacaccctgtgatatttttcataatattttagggagatattgcttctaatatcactgtgaggatacaccatgtgtgtacactctctgatattattccgtatgtcctagaaagatattactcctgatatcacagtgagtgtaccccatgtgtgtccaccctgtgatattattcataatatcaagagtaaacattacatctaatatcacagagagtgtggaccctgtgatatttctcaaaatattgtagggagatactgcttctaatatcacagtgggtacacaccatatgtgttcattctgtgatattattccttatatcctagggagatattactcctaatatcacagagggtgtacacccagcgacattattcgtaatatcctaggaggatgttactcctaaggtcacagtgggtatacaccctgtgatattattcataatattctaggaagatgttacttttaaagtcacagggcatgtacaccctttgatatcattcgtaatatcctaggcagatataactcctaatattatagcgggtgtaccccatgtgtgtacacccttgatattactcataatatccagggtaaatattcattctaatatcacagagggtgtacatcctgtgatatttttcataatatttttggagatattgcttctaatatcgcagtgggtgtaccccatgtgcgtacactctgtggtattattttttatatcctagggagatattacccctaatatcacagtgggtgtgagaggttacagcgtgctggcagtcctcacagccctcgctcgctctcagcgactcctctgcctgggcttccactttggcggcacttgaggagcccttcagcccaccgctgcactgtgggagcccctttctgggctggccaaggcgggagccggctccctcagcttggtgggaagtgtggagggaaaggcgcgagcgggaaccggggctgcgcgcggcgcttgcgggcccgctggagttccgggtgggcgtggccttggcgggccccgcactcggagcagcaggccggcctgccggccctgggcaatgaggggcttagcacccgggccagcggctgtggagggtgtactgggtcccccagcagtgccagcccgccggcgctgcgctcgatttctcaccgggccttagctgccttcccgcggggcagggctcgggacctgcagcccgccatgcctgagcctcccacccactccatgggctcctgtgcggccggagcctccccaatgagcgctgtcccctgctccacggcgcccagtcccatcgaccacccaagggctgaggagtgcgggcgcacagcgcaggactggcaggcagctccacctgcagccccggtgcaggatccactgggtgaagccagctgggctcctgagtctggtggggacgtggagaacctctatgtctagctcagggatcgtaaatacaccagtcagcacactgtgtctagctcagggttttcgaatacaccaacggacactctatatctgactactctggtggggccttggagaacctttgtgttgacactctgtatctagctaatctggtggggacgtggagaaactttgtgtctagctcagggattgtaaaggcaccaatcagtgccctgtcaaaacagaccactcggctctaccaatcagcaagatgtgggtggggccagatgagagaataaaagcaggctgcccgagccagcagtagcaaccctttccggtcctcttccaaactgtgggagttttgttctttcgctctttgggtacacactgcttttatgagctgtaacactcaccgcgaaggtctgcagcttcactcctgaagccagggagaccagagcccaccgggaggaacgaacaactccagacgcgctgccttaagagctgtaacactcaccgcgagggtccgcggcttcattcttgaagtcagtgagaccaagaacccaccaattccggacacaggtgtacatccttttatattattcgtatttgaccttgctgccttttcttttcttttcttttttttttttttgagatggagtcttgctctatcgcacaggctggagtgcagtggcgcgattttggcttactgcaagctccgcctcccggattcacgccattctcctgcctcagcctcccgagtagctggggttacaggcgcccaccaacatacccggctaatttttttgtatttttagtagagacagggtttcaccgtgttagccaggatggtctcgatcatcctgacctcgtgatccgcccacttcggcctcccaaagtgctgggattacaggtgtgagccactgcgcccggccccttgctgccttttctaactcacactacggaaggaatggaacagataataagaaaatgagattagactattctgcagtgcagctgccgcagggcacttttaatttccctgttaggctgtagatgaaggggttcagcatgggagtaaccaccgtgtacatcactgaggccactgcaccttttctgggataagaggacatgtctgaactgaggtcccctccaaagcctgttccataaaataagcaaacaactgacaggtgagagccacaggtggagaaggctttatacttcccacctgatgatgaaaccctcagaatggaggaaacaattttatagtaagagaaaaggtccccgaaatgggaagaaaaccaaatatggcagcaaggaaatacatgactatgtcattggtgaaggtgtcacaacaggcaagggtgggggagttgagaagggtcacagaagaaattgggaatttccacatccttgaagcaggtaatttgtaaggcaatccaattgtgcagctgggagtctaaaagactgagaaaaaaagacaacaaaactaggaagccacagaaacatgggttcatgatgactggataatccagagggtgacagatgtccacaaaccggtcataagccatcacactcagaagcatgtcttccatgcatccaaaaacggcaaaaagagatacctgagtcaggcagcccgcataggagatgactctgctgtgagactggatgtccacaatcatcttggagactatggtggaggggaaaccgatgccagccaaggacaggttggagaggaatctggctatttcccggtttccatttaatattggagttacagagaatgtcttaattcacttctattagcccttgcattggattggcctttaatgtgccagagacttatgtttgatgcttgtttcagtgactctccgggtctaagtattttgtccaaatgaatatacaatggtatattccttacttattgaactttagttatttgataactgatacatcactgaaatacaagacattctcagaaggtggcaattaacgtgttgaccagggtggcagtcatctgaaggctggaaggtagaggatcaacttccaacctcactcacaaggttgttaccaggattcggttgctctgaaacattagacagaaaattccctcaatttcttgcattaagggtctctgcataaagcagctgaccacatggcatttggcttccatcaatgcaaagcaagatggggcagcaaaataaaagctgaggtccttcgttctattctcagagtgacatcacatcacttcttccacactctcgtagttgggaatcagtcaccaggtgcatctcacactaaataggagcagattgcccaagggtatgaaaaccaggaggtgggatgtccttgggaacatctcagatgctgctcatcacacaggccccattttctgccaggactttgggctccaaggacatcaagaaccaggtctgtttcctctgttttctttttctttctttttttctttttgtgagatggagtcttgctctgtcacccaggctgaagtgcagtggcacaatcggctcactgcaacctctgcctcctgggttcaagccattctcctgcctcagcttccccagtaactggaattacaggtgtgcaccaccacgcccagctaatttttgtattttagtagaaatggggtttcacatgttggacaggctgatcttgaactcctgacctcgtgatccgcccaccttggcctcccaaagtgctgggaatacaggcgtgagccaccgcgcccggccctcagtttcctctgttttctagcataggatccaacacaccacaatatctcaacatgattcagtggagacggagaacttcctctgtgctgggtccttctgtggaccccaccatactgctcctggacatgcagtgcaatgtagcccccttctgtagctgaatttaggcaatgtccaggggttttgatttctgctcacttgaaaggctgaagtagcttcagaatataagtttcttttatttatttactttttaagatgaagtctcactctgtcacccaggctggagtgcagaggcatgatctcagctcactgtaacctctgcctatggggttcaagccattctcctgcctcagcctcccacatagctgaaactacaggtatgtgccacaacgcccggctaatttttgtatttttagtagagatggggtttcaccatcttggccaggctggtctcaatctccttaactcgggtgattcacccaactaggcctcccaaaatgctggcattacagtcatgagtcactgcacccggtccagaatatagcttctatagtatcattgtgtgttcccagctcttgagcactctaataaaaggtgttttctggctgcctgggttttttctaatagatcacgtgagatgcacgtgaagagtggtctgttgccatcttctgcattttatcaatggagctccctggctgagaaatatctactctaaagaaatgagatttatggcctggcgcgatggctcatgcctgtagtcccagcactttgggaggccaaggcaggcggatcgtctgcgatcaggagttcgagatcagcctggccaacgtagtaaaaccccgtctctactaaatatacaaaaaaaaaaaaattagccaggcatgattgtggtcgactgaagtcccaactatttgagaggctgaggcaggagaatcccttgaaccccggaggcggaggttgcagtaagtcgagatcgcaccactgcactccagcctgggcgacagagtgagactccgaaaaaaaaaaaaaaagaaatgagatttgtctttagtggacataaagaacactttcatatacaccagatgaaattggatatggatgaaaggatgttattgacctgtggtgtgtaaataaatgacagtgtttttgagggagaccagatggcaggtgtatagaggtaaatagggaaagaagtctatgatttgagacacatagaatgacagcacattggaaaaaagaatatacttattttttgagacagaatcttcctctgtcacccaggctggagtgcaatggtacaatcacagctcagtgtcacctcgaactcctgggctcaagcaatcctccaaacttcaccctctagaatagctaggactacaggaatgtgccaccacacccagctaattttttatttatttttatttattttattgagatagagtctctctctgttgcccaggctggagtgcagtggcacgatcccggctcactgcaacctccgcctcccaggttcaagcgattctcctgcctcagcctcctgagtagctgggactacaggcgtgtacccccatgcccagctaatttttgtgtttttagtagcgacatggccaggctggtctccaactcttggcctcaagtgatccacccaccttggccttctaaagtactgggattacaggcgtgagccactgcacctagcttgtaatactgttcttgccagtacatttgactatatcccctcaaacagcctctcagttaagcaattatcgctctacagataaaatattaatcattcgatagaaatatggtttatatcataccctgagccatgcagcttataacatcattactaatatattctggaaatatgcacataaaattaaattctttaaatgtgatactagaagctaccatttgatgggaaactactctgactggttcatgacacaagatatacaatcggctgggcacagtgcctcacgcctgtaatcccagcactttgggaggccaaggcgggtggatcatgaggtcaggagttcaataccagcctggccaggatggtgaaaccccatctctattaaaaatacaaaaaaattaactaggagtggtggtgtaatcccagctactcgggaggctgaggcagagagttgcttgaacccgggaggcagaggttgcagtgagtcgagatcatgccactgcactccagcctgggtgacagaggaagactccatctcaaaaaaaataaaaataaaataaaataataataataaaaagatatgcaatcattgcatggccttgggggaaaaaaaggctattgcacttactttgctgcagagaaatctgaggctcagaaaggagctgtgagttgtgatatcaccaggacaccagtgtcattgctcagacactcctagacacaaggacgctgttgaggtatatgggatccgcttgtgatgtttatgatgaacaaatgataccagaatactcacccgttccaactaaagacccaaaaaaggaagcaatattcatacatgaaacatggagagaaacgaaagcaaacaagcaacaaaaataatgtgaccaaagagacagaatttgcaaatagacatgtttgattttgcaatatatttcagcccccactacagaaaggatggaacagataatgagattagactgttctgctgtgcagcctccacagggcacttttaatgtccctgtttctcaggctgtagatgaaggggttcagcatagggatgaccacagtgtacatcactgaggtgaccgcacccttcctggggaaagaggacgcagctgaactgaggtaggctccaagtcctgttccataaaataagcaaacaactgccaggtgagagccacatgtggagaaggctttatacttcccatctgatgatggaattcttagaatggaggagacaattttatagtaagacaaaaggatccctgagatgggaagaaaaccaaatataacactatctaaatacatgaatatgttattgatgacactgtcagaacaggcaaggttgagaagttgagatggctcacagaaaaaattaaagatttccacattcttgaagcaggtgaattgtaacacaatctgattgtgcagctgggagttcaacaggctaagaataaaagacaccaaaactaagaagacacagagatggggattcatgatgactgggtagcgtagggggtgacaaatggccacaaactggtcataggccatcacagtcaggaccatgtcattcatacacacaaaatagataaagacatctgcatcaggcagccctcataggagatgattctgctgtgagattgcatatcaacaatcatcttagggatggtggcagaggtgagtccgatgtcagccaaggacaagttggagaggaagaagtacatgggggtgtggaggtgggagtcacagctgacggccaggatgatgagcaggttccccagcaccgtgatcaggtacatggacaggaacagcccaacgaggacgggctgcagttctggatcctctgagagtcccaggaagagaaattctaagacacctgtgagattctgcgagtctgtgtaacttggacaccttgagaagaaaagagggttgaaaaaataaaagacataaatcagcacttactgctgtgtgcatattttggatacaagcaattcacaagtaacattttcacacttgaagaccatacaccctcagcaatatttctccattgtgagaaacccaaaaatctcagaattattacatgatttacttttttgctattcaactctttctgtatatacctacttcagagaaaatccactgaagaatgttaaaagatcaaggacgtaatatataacaaatccatgattgcaataaaacatggcctagtcttttcagaaaaaaaaaataagaaatgtacttttctaagaaaaaaaaagcccaatttaattaaaagaaattaagaagcagtgaaatataattcattttattctgacactgtgctacaaactccttggatgtagaatatttataaacactatacaagagctaggagcacattatctagaaactaaaacagacctgctagttcataatcagaagacctttttacatgccaattacttttcatattttttatcattcttaggttttctgacatcatttcttcacacaagtaaatgcacactcaaatataggagctatgtttccaaatttatttaatatatagctcttgtccttggctcatgttttctttgggttttgataagaaagctttgttgcacataatcataggccttcagcaaccacacagctatcgataatgtgtaatgcatgtgtcatcactaaataataatgaagtttaataacattttctctttattttattttagcctggaatgatgcgaaactcaaaattgtgtctaagcacgagaatcaggtctacctgccctcttctctttgtgcctttcttcattctgatatagctacaaaaatctctgcgatggtatttaggtacttgaacattgcagatgctattaaatggaattctaaggtccctgtgtctgtgacatagacataaacaggtgttatcttgtatctcattttattagacattcctaaagggatgaggggacagacaagaaaccaccaactgtgttgaggtcacactaatcacagccaattttttgtgatccaaggaagggcctatccagtatttaacggggaactttatttttgatgcctcctttgggactggcaagatataggctctgggggatcagaaacgaaagagatgcaaacattcctctcataatactcagcacttacttagataggtgcaaatgtcaaatgtcctgtcagggatgtagggaactgtaacttcaggccagaggacatttcagttcaattgtatgaagattaagcttaaaatagtaataagaatatcaaaattcactttggttttatgtatccatcacatagagatcagcagagaacacccatgatctgttgaatcatcactcactgtagttgggtcaactagaaatcagctcagatgatagtgctgagtctcagagacacagagatctcaccccgtgtcacagagttcagggaaatgggcagattcaaaactaaatggtccgtctctgaggcccaggcactacccttcttcattattgttcagctctcagaaagtcttaagcagaggtgggaggtcttaactacaggcacttctggggtgcatttagaaacgagttccagcttcctgaatagaaatggagccaagaccctgattttatgtctcctttgaggaggtggagagctgcaaggaaagccaggaacgggggaaagggagagatgcaccctgaatgatcctgtgccagttctttctgggatctttgatgtgatctcagctgccctttctatacgtgatactatgaatgtagcaccctctagtctagctgtggtctaccaggaaccccccaagggaagggcacagtgagcaagggcatctgccaggactgacagggatttgagagggcaggttggactcagagagaggcctggcccaatgccatgtgtctggacttagacggctcctttcctattctataattaagaataatgcggcaggtataattcagggaagactaagcagatgaaagagaacaggcttcatagaacatcaagaagtcctcagtaaaagttcatgatagcctggtgaccatcgtcttcctcctcatcctcatcatcaccttcataatccttttggcatgcttagggaacacgctattacgagtgagatgtctttgggaagttgaaccagtgtggaagaaaagttaaactttgaatgagatttctgagaccaatcacaacccagaacataaactccacggtcgtctgagctgacattttgcacgtgggtttcctcccatctgccaccccactgtcctgtttgtcctgaggatgaggaaacaaggctcccgaccatccctcagcactcactgagctgcgcttcccctctgctgggccatgaccacggagagcaggtccgccgtcctccctgtgtggtgcacgatggaggctcaggctccgtcctcaggactggcaggaagacagggtcagacatgagcctcctgatgcagacgacaggtgtggagcccactggactggaagctcacactgcagggctggaggcacaggctgagtatttactgtcctatggccttgggggctcaaggcacagagctcctcattagccaaactggcccaagttccccagtctttaaggacttcctcattaatgcaagataaagcagaaaaaatgaacgtccccaggaacttttgggctcttcctctaatgaggagaaagcttgtgttcatcgttcacttctttcatttctttttctttttcaaggatgcatcttttttaagttttcatatttttatcctggcaaaatgtaccacattcaatataaaaattataaatataggtttatacaaaatggtaagtaacattttaccatttatcctcttcaaaatggtaaccaataccattttaaccacttttcactgtacagtttgctggcattaagtacatccacagtgttgtgcaaccaccaccgtcatgcatcaatatatttctctttcagaacagaaactcctgactgcaagcaatccacccagcttggcttcccgaagtgctggcattacaggcgtgagccactgcacccggccattctgtatgctcattgtctatttgtttatcttctttagagaaatgtctattctagtcctcttgatggagcagttaactcccattaatatcaagcaatggattgttcaatacttcattatgcaaaaataaataataggtttttttttattttaaaacatcaagcaacagggccacagagtggcagttaaaaaaaaaaaaagctactgttgtttcaaccttcaatcggaacacagagatccccatattcttgtcatcagaagctactcatggagtccagcccacactcaagaagaggagatgacactcgggcatgaaaactaggagggagggacccttggaagggtcttaggagccacccgcaggcttcatcttctatcagggttttgtactctaagcacagcaacactctgcagatatccagcataattcccaattcatcacaccactatgatcacaaccaaaaaattccaaaaaaaaaaaaatgtctggaaggaaaaactggcacttgggcagaacttcttctacattgagtacccacctgaccaagcagtgcacagaagcctccctggattctcttacccctgtagagtcctgccattgacatcaggccaaccagcagccactctatgcctgagaacaacaaatctcccctgcagcttccgatttccactcagttatcaagggatcatcttgccggtccacaatgtgtcatcattgtttttctttgtgtttacagcttggggactgcccttcccattagtgcatttccctgacattgcccaagatattatgggtatttcaagtttcaagatttcagtaatgcaccgcataaggatgtttcaatgaccagactacatacacagtggtggttccgtaagattttaagggagctgaaaaatccctatagcctagtgatgtcttagccattgtggcatcataatgatagcagtggctgctgccatcaggccagctgcagcagagaaggggcagctggggctgcaaactccatggagccagagggagccccgcccaccccttatgagctggagctggagctccccaggtgctgttgcagccgcccaatccatggatgcagacccaggcctccggctccacagagcaggcaggagcctgtgctctcctgggtggggctacagctgccccatctggctgtggttccgagcctccctgtgctcttggaggcgggcaggagcagacaggatctgctctcccgggtgcagctgtagccgactgacccacagctgcagacctggggctcccactccacggagcaggaaggagccagggacaagtgggagccccaaccctcccgagttggcatggcaggagctcccagggtgtagctgccactgccctcccaggcacaggacccaggcatatctgcagcctccaccctcgggggcctgggaaggaccctccaatcactgcaggcttggcagtgtctgctcccacagcctggcctctttcccttctggtgcctcctccagtctcggagaggggttgggaccagctctggggccataaatggcagtgggatacagagttctggataaaagggggcaggtccccagtaagaccctaccttcaggccatggaaggcctgaaggctagacaccatgatgccagtctcacggatggagtggggacttgtagtgcctcctctggcccacccatggctgcccgtggagcgatcagcatgtgcttcctcccctctgaggtccataaaagccccgggctcagccagagcagggcagaggatggagagatgaccagacgacctgttagcagggaggagccaccctctccagggccccatctcagctgagagctgaacacttcaccagaagacctgcctacagagagcagttacccactgtgggtctcctctaagctgttgtaacactcaataaagctcctcttcatcttgttcaccctccagttgcctgcgtacctcattcttcctggatgcaagacaagaattcaggcaaaggcaccactggccacagagctttccagacagaaaagtgaaaccctaaagatcccataacaataacacaatgtattccccacgtttgtgatgatgcttgtgtaaacgaacctactgcactgccagttacataatactgtagcacatataattctaggtagtatgtaatgcttgacagtcatcataaatgaccatgttagtgatttatgtatttactatactatacttttaatcattattttagagtgttgtccttctattttttattattttttaatttattttttattatacttttaagctttagggtacatgtgcaaaatgtgcaagtttgttacatatatatacatgtgccatgttggtgtgctgcacccattaactaatcatttacattaggtatatctcctaatgctattcctccccgctccccccatcccatgacaggccccagtgtgtgctgttccccatcctgtgtccaagtgttctcattgttcaatttccacctgtgagtgagaacatgcagtgtttggtttcctgtccttgcaatagtttgctcagaatgatggtttccagcttcattcatgttcctacaaaggacatgaactcatccttttttatggctgcatagtatttcatggtgtatatgtgccacgttttcttaatccagtctatcattcatgtcgtccttctatttttatattttaaaaaattaactggaaacagcctcaggcaggtccttcaggaggtattttggaagaaggcattgttgtgatagatgacagctccatgagtggcattgagaccttccagtgggacaagatgtggaggtgggagatgttatattcatgctcctgaccctgtgtatgcctgggctaatgtgtgttcgtgtctttattttttggtgcttttttttttgtagggactgtgtctcgctatgtggaccaggcaggtctcaaactcctggccacaagtgaatctcttcctggctctccaaaagtactgggattacaggcgtgaatcacagctcctggctatgtgtcatagtttttaacagaaaaaaattttaactaaaaaaaaaaaatcttaatagaaaaaagttatagaataaggatagaaagaaaataacttttgtaacagctgtacaatctgtgttttaagctaagtgttattacaaaacagtcaaaagccttttttaaaaagtgaaaatgttacagtaagcaaggttaattgattcttgaaaacagaaaaatattttttacaaatttagtgtagcctaagtgtacagtgtttctaaagtcttataatgatgtacagtaatgtcctaggccttcacattcaccccctactcaacgactcacccagatcaacttccagtcctgcaagctccattcatggtaagtaccctaaacaggtggaacttcttttgtcttttagactgtacctttaaactatattttaactgtaccttttctatgtctagatacacaaataccattgcactactattgcctacagtattcagcacagtgacatgctgtgtgggtttgtagcctaggagcagtaggtcatagcgtagaaactaggtgtgtagtgggctctactatcaagttagtcttgattcctctttcttttttatttgtatttttgcgttttgttttgttttgttttgttttgcttttgagacagagtcttgctttgtcaccaggcttgtagtgcagcggcgccatctcggctcactgcaacctccacctcccaagttcaagtgattctcctgcctcagccccccaagtagctgggattacaggcgtccaccaccacacccaggtaattttttttgtatttttagtagagatagggtttcaacatattggccagcatgatctcaatttcttgacctcgtgatctgcccacctcggcctcccaaagtactgggattacaggtgtgagccactgctccgggcctgattcctctttcaatatcattaccttctctgtgatctcacacgttttgagtactataaaggaaagtctttgtagcaatcagactcagctattctcttccaaattaaacatatgcaagtcatcaagacagtgagctttgatctctttgcagtccaaagtcctttgcagagtgtcatgttattgatttaaactagcaagacattgggtaattccatcgccaaaaccatatatcagttggtagaaatttgctatgaagtgtggaaagtcattgatcgtgtcaaagaaaaattacatcacatggggtcaagctggcaaagaagactttattcaagacaattgcaataagggtcaagactattgccttagggaggccaggcaatgtggctcacgcctgtaatgccagcactttgggaggccgaggcagatggatcacaaggtcaagagattgagaccattctggccaacatggtgaaaccctgtctctactaaaaatacaaaaattagctgggcatggtggcggatgcctgtagtcccagctactcaggaggctgaggcaggagaatcacttgaacccatgaggcagaggttgcagtgagtcaagattgcaccactgcactctagctcggcgacagagggatgctccgtctcaaaaaaaaaaaaaaaaaaaaaagactattgcattagggaaaagagattgaactcaactccactgaaacaaaaatgagaggattttcaaatgctggagtgagctaatggaaaagcccaggaagacgttagggaggaggttgtccagtgtgatttggccatgtgtgttcactaattgtcacttacagaaggctcctaccctcccaaagaagctgaaagatagggatgttgtttttattaataattacatttcaaagggatggcaaccaggtccttgagaaagagattcctgggttatacaactgggatgtggcagggcgtgatggctcacacctgtaatcccagcactttgggaggccaaagtgggatgatcatttgagccaaggaattcaagaccagcctgggcaacgtagcaagaccccatctctaccaggaaaaaaaaattagccaggcatggtggcctgtatgcctgtaatcccagctgcttgggagtctgaggcaagaggatcacttgagcctaggagttcgaggctgcaatgagctatgatcacgccactgcactccagcctaggtgacagagtgacagacagtctcataaaaaaaaaaaaggcatgagacttaaaaatgatttatctccctttcaagggagcagataaataatttgcaatcacaagttttttaaagtaaatgctctaaaaaaaggtcagggctctgtagtcaggaagaaacctagctcgttttgtaaagctgaggaaaacgttaaagccatcttagtccattgaaaatcagaattttcaaaactgttgttccaactcttgaatatttaaacatagcaccgttaactgtcatagtaaaacagaggtgttcttgttgttgtcattgtcgttgttgttgttttgagatgaagtctcactctgtcgtccaggctggggtgcagtggcgcaatctcactgcattggatgatgatttgcagcatcatccaaagacacatatccgattgcttcttgggacatccctgcataatctctccttacaccaaggtattcactgcaaccaccgcctcccaggttcaagtgattctcctgcctcagcctcctgagtagctggaactacaggtgcacgctaccacacctagctaacttttgtatttttagtagagatggggtttcaccatattgaccagcctagttttgaactcctgacttccagtgatctgcctacctcagcctcccaaagtgctgggattataggcgtaagccaccgcgcccagcctaaaacagaggttgtatatttttttttactagtatcttgagttccaagctcaaatgacaacactaaaagtgagaggcaaggtaggctatcaggcagcaagtctaaaatggtaaacagggtccatgacccacagagatttgtggtgatggcaacagattgtaggtgagcagacatcgagtgtattgtttgacctacatatccaaaaatatcatgatcaagtcagcagaagtcagatgtcagccaccaccattgaaaatcatgattcttctactagttttcttgttttttaatgatcactgcacatttaatctttaaatatgtacattaggccagacgcggtggtttatgcctgtaatcccagcactttgggaggccgaggcgggcagatcatgatggcaaaagatggagaccatcctggccaacatggtgaaacctcgtctgtactaaaaatacaaaaattagctgggcgtggtggtgggcgcctgtagtcccagctactcaggaggctgaggcagggaaatagcttgaacccaggaggcagaagttgcagtgagccaagatcgcgccactgcactccagcctggcaacagagtaagactccgtcaaaaaaaaaaaaaaaaaaaaaaggacattaaacatcatatttgggttttatttaaaaacttcatttttgtgccttgtttcataatacatacttatagtttaagtgtttttctattgtaaaatgacatgactttcttaaggaccacatggtgtaatagcaaattgaacttgtcttctaccagttttcatactcaagcctgttttcagatttagagcattgaaattgaagagttgctgggctcatctttggatgtcagtatatggcctctaaatagtcatattcctcgaggaccacatggtggcaagttgattacatcagacactttgcaccccagggtaggcagcaattcatctttactgagatgaatatttatttatgtacttacgtttgcctttcctgcccgcagtgccttggcaaacagcatcatccaaagacatattatccaatttcttgttggaatatccctccataatctcaccttacaccaaggtacttgttttatggtggaggagatattaaaatgaacatttaggaagagatccagtagtcctaatggatttgcagcatctgaagctgctcagcactatatacctagattctggcaactctgtgattcagttctcactctcctgaatcataagctagtgctcgctgctggcaccatatttgaagatgtttctacattcagccaggtgctgttactgtctaaactcctgttttgggcctctgtgaattcacctgcaaaattaggcaactagacaaaatacagcacgatcagacctaaaattctgggcagatggtttgtctgtttctggtgatacattttcttttttctttcttttttttttttgagatggagttttgttcttgttgcccaggctggcgtgcagtggcgctatctcgcctcaccacaacctctgcctcccaggttcaagccattctcctgcctcagcctcctgagtagctgagattacaggtgcgggccaccacacccagctaattttgtatttttagtagagatggggtttcgccatgttagtcaggctggtctcaaactcctgacctcaggtgatccacccaccttggcctcccaaattgctgtgattacaggtgtgaaccaccgtacccggcctttttttttttttttaagcagggtctctttctgtctctgaggctagagtgcagtggcaccatcacggcttactacatgctcaaactcttgggctcaagtgatcttcctgcctcagcctcccaagtggctgggactataggtgaacactacaatagctggcttttttttttttttttttgagactcttgacctcaggtgatccacccacctcgacctcccaaattgctgggattacaggtgtgagccaccacgcctggcctattttttttttttttttttgtaaagaaagggtctccctattttctttattttagaggctatcaaagcttattttagaaatgtactaaacaaacatatggagaaatgttcaacctcactaataaggaaataaattatttacccatcaatctattttaagtttgaacatacaacatgatctgataacattctaagattgcagatttaactctatggggcaagaatttattttcacttctgtatcccaggcacctagaacagcctggcacactataaggtccaataaatactgtcaaaggattattgagaaaggtttaagaaaagattgtcaaatgaatgaacttgataagagctagctagcaatggttaatggtaaaatgaactatttcataacttttatccaacaatgtctgagttaagtacttaaacttgttgtattaaccctcaggaatcaacacaaacaaatctacaaacaccaagctgaggtgcaatcgtggaaaatgtaagaggagatgaaagggtagaactgaaggataacagagaagtctctttgtataagactcatacaaagtactcacagtactcacaaggtaatgttgaccaaaggcagagaaacagagaaacaaattccatgagattaagaggcagaattttttttttgagacattttactatctttgttgcccaaactggtcttgaacttctggtctcaagtgatcttcctgtctcagcctcccaaagcactgggattacaggtgtgagccactgcgcctggcctacaggcagaatttctttagttgctgttgtttttgagacagggtctggctctattgcccaggctagagtgcagtggcatgatctcgactcactgaagcctcagcctcctggactcaagggatcctcccacctcagcctcctgagtagctgggaccacaggtacaccaccatgcctggctaaattttatattttttttgtagagacagggtcttgctatgttgcccaggctggtccagaatttctttagctcactgctgctacctctgccaactcagaagcccaggaccaatgtccccgtcattgagcatacagcattctcccaagcagtgtttctagggtcctcttgatgtccctgttccgcaagcaatagatgaaggggttcagcatgggggtgaccacagtgtacatgaccgaggccaccatgccccaccaggaagaggacgatgcattggaactaagatacacaccaaggcctgtcccatagaataaagaaaccacaaacagatgagatccacaggtagaaaaggctttgtgtttcccatctgtggatgagattctcaggatgtaggagacaatttgggtgtaggagaaaaggatccctgagaagggcacaaagtccagaaggccggccaccacgtagagcaggatgtaattgacatgtgtgtctgagcaggtaagcctgaggacctgagcaagctcacagtaaaagtgctgaatgactcaactggtgcagaaggacacccgcagcaccaacagactctggatcagggagtatgacaagctgaggaaccaggacacaagaaccagcaggccacagaggcaggggttcctggtgacacagtagtacagggggtgacagatggccacataccggtcataggccatcacggtgaggagaaatgtgtccatgcctccaaaaaccatgaaaaacatacatctgggcgatgcagtctgcatagctgatggcattgctctgcacctggatgttcaccagcatcttggggactgcggtggaggtgaaaccgatgtcagccagggacagattggagaggaagaagtacctgggggtgtggaggtgggagtcagagctgatggccaggatgatgagcaggttccccagaacggtgaccaggtacatggacagaaacagtgcaaagagcaactgttgatcctctaggtcttgggaaaatcccaggagtaaaaattctgaaactcttgtttgatttcccaagtccatgttgctgacacatcagctagacagttaaggaagggaagaaacatgaaatagatgctgaacaggctccaaaatctctctgcttttttatttcttgaggtgaataattggatacaaaagctttaaaatagcaaaacttaggaatcctacattctgtcatttgttataggcaacatttcataacgttgactaacccctgttcattggcctctcagaggcttacccattccctttttctctgctttagaatcatcaaatctaccaagagcaactttagaccttagagataaaatggtctgcacctgctctaacacatataaggttcagtgaacttaagaaaaggtcagggtcatcttccttgtctaagacacaactgagactgaagaaggtcagacaactatgtctgagcagtgagaaaatatgaaagcagagataatagctagacaaaatattgcaagatgagtggatttaggttttcaaggaaggaaagaggaagggagggagggaaggaggaaggaagggaaggaaggaaagaaggaaggaaggaaaggaagaaaggaaggaaggaaggaaggaaggaaggaaggaaggaaggaaggaaggaagggttacttgttgccttaagtcccacttggaattatggtggcagccaaattctgattcaaataggtcatgacattaccagtaataacattcatcttaagaagctgaccgcacattaaaaactttctaccttagaaccagggtttcaaaattagagaccagaaagatacagtcatttgacacttatatgattctctttttccatccacataataaatatgtcctaatctgtttctagtgtctagtgttggtgcacaattttttttgttgttgttgggtttttgtttgttttcttttcttttgagacagagtcttgagctgtcacccaggctggagagttcagtggcgcaatctcggctcactataacctctgcctcccgggttcaaacaattctcctgcctcagcctcctgagtagctgggattacaggtgtgcaccaccatgcccagctagtttttgtaaaaatacaaaactaactagctagttttttacaaaaactagttagttttaccatgttggccaggctggtcttcaactcccaacctcaggtgatctgcccacctcggcctcccaaagtgctgggattacaggcatgagccacagcacgtggcctggtgcataatttttgttgagccgtgctgggaagtacagaagaattgaactaggttgacaactaggttgtcagtcactgaaaaagtgctaacagccattctgcaagagggtcttctttgggccaggctaagtgttagctgttggggatacaaagattaatgatgtggtcttttttttcttatggttccaccttccagaagatggattcagaaacagatcattgtaacacagtgaattaagtgctaaaataaaacgatgtacagagtggagtacagagaggaaccctcaatccagcctggagtaatgcattcagggaaggagtcctggaggaaggaatacctgggcaaggagttacccaggtgaatggttgcacaggggcatttctggcagagatataagcaagggaataagcctagaagcaagaagcagcatgggacagagttctcttagccctttgctgctgcttaagtacaaagtgttagatagaaacgatgaggatgatgttggagaggtgggcagggatgacatgtctaagaactttgaaaagtataatccataaaggatggggctgtgaaggaacggcaatcaaaggagtaacatgataggaattgcaattctccctggggcctggagggaaagatggatttagggcaggcaaaactaaggataagggaacagggttggggattcttcatatcattggaattgaggggaacaactcaggaatatttttgcagaagaaatacaaaggccaggagaggtaaaggaatgaggtcaatgtcttgctaacaatctcagcttaaggatgagacttgaccttcaagtgaaatgaagggaattatggaaaagaatcctgcaggtttcaatgcttccctcgtgttccccagaggatacgatgtcaagaggagactggatgttgggcttgcctgagcccttcactttccctcactcacccatcgtaccctagttgttatacaccatggccttccattccagggaacacagacgcttgtctcttgaaggtgtctacttagaatcatggataagggtaaagaaggatggggaaggataagtctttctggagaggcaggagatgtttccaagcaagtgagggtcacagagaagaattcagagaggcttgatctaggctgagggcctctgaagttcttgggtcaggtagtaggtgaaaagaactagaagtgaccaggacttcactgcaaggcacctacagctcctactgaaacctgcaggattcttttccataattcccttcatttcacttgaagtcaagtctcgtccttaagctgagattgttagcaagacattgacctcattcctttacctctcctggcctttgtttttcttctgcaaaaatattcctgagttgttcccctcaattccaatgatatgaggaatccccaaccctgtttccttgtccttagttttgcctgccctaaatccatctttccctccaggccccagggagaattgcaattcctatcatgtaccttggagcatccatttgtacaatgcagattggtcactccaagaccacacagagtgatccagggcagcgctaagatatcaaacagtgccccaggccaacaaagagtagcccttcctataacctccatcagtcatctacccaagtaatatacaggcaaagttaaagctcgctatacaatggctatttaagcaagtagtctagccattctcccttccaagaaatcagcctcaacagccccttctccgtggacatcacagggtttctcctgccctatgattaacaagtcaatgcctttcccctcaatcatctcttttccctatttccctcaacacttactgagctatgaaggtttgacaatgtggacccaccacaggagccaccttgtgtccagaattggtgggttcttggtctcactgacttcaagaatgaagccgcagaccctcgcggtgagtgttacagctcttaagtggcgcgtctggagtttgttccttctgatgttcggatgtgttcggagtttcttccttctggtgggtccatggtctcgctggctcaggagtgaagctgcagaccttcactgtgagtgttacagctcttaaagcagcgcgtttggagttgttcgttcctcccagtaggctcgtggtctcgctggcttcaggagtgaagctgcagaccttcgcggtgagtgttacagctcataaaagcagcgtggacccaaagagtaagcagtagtaagatttattgcaaagagcaaaagaacaaagcttccatagcttggaaggggatccgagcgaggtgccactgctggctggggcaacctgcttttattctggtatctggccccacccacatcctgctgattggtagagccagtggtctgttttgacagggtgctgattggtgcctttacaacccctaagctagacacaaaggttgtccacgtccccactaaattaactagatacagagtgtccacacaaaggttctccaaggccccaccagagtagccagatacagagtgtcaattggtgcattcacaaaccctgagctagacatagggtgctgattggtgtgtttacaaaccttgagctagatacagagtgccgattggtgtatttacaatccctgagctagacatgaaggttctccaaggccccaccagagtagctagatacagagtgtccattggtgcattcacagaccctgagctagacacagggtgctgattggtgtatttacaatccctgagctagacataggggttctccatatctccaccagactcaggagcccagctggcttcacccagtggatcccgcactggggctgcaggtggagctgcctgccagtcccggtgccgtgcgcccgcactcctcagcccttgggtggtcgatgggactgggagccgcggagcagagggtggcgctcgtcggggaggcgcgggccgcacaggagcccatggagggggtgggaggctcaggcatggcgggctgcaggtcccaagccctgccccgtgggaaggcagctaaggcccggtgagaaatcgagcgcagcgccggcgggctggcactgctgggggacccagtacaccctccacagccgctggcccggttgctaagcccctcattgcccgggccgggcagggcaggccggctgctcggagtgcggggcccgccaaggccacgcccacccggaactccagccgggcccgcaagcgccgcgcgcagccccggttgccgctcgcgcctttccctccacacctccctgcaagctgagggagccggctccggccttggcctgcccagaaaggggctcccacagtgcagcggtgggctgaagggctcctcaagtgccgccaaagtgggagcccaggcagaggagtcgcggagagtgagcgagggctgtgaggactgccagcacgctgtcacctctcaacctcccctgaatcttgttgtctcgtggaagtaggcgatgaagacagaagctctgccccccaaaagagcagggagacagagcccggcaggtggtacgcggcctggatgatttctcctggagaacgcatgagtgtcttggaccttgcgcctgggggcctgggtgactgtaagtagatgaattgcatgttgggccctggggtggtctatcccctctgaagcttgttagacaaattggtcaatggcgtattcattccctgatcagtttggttcctcatgggcagggactacacaggaagaggtctctgaacggccaattccttattcttgggagactatcaatggggccagctgtgactcccgtctcctgtacctctcctttgggaagaatcactctagtctactttgaatcacctttggtgacaactgtcagcaatttttttttttttgagacagaatctcgctctgtcacccagcctgaagtacagtggcgaaatcttggctcattgcaatgtctacctcccaggttaagcgattcccctgcctcagcctcccaagtggctaggattacaggcgcgtgccaccatgcccggctaacttttgtatttttagtagagatggggtttcaccgtgctggcagtctgatcttgaactcctgccttcaagtgatctgcccatcttggcctcccaaagtgctggaattacagtcgtgagccaccacacctgggcagcattttctgacttgaggtttcctaattaggcagatagttgggtagcaaagggtcccaggattcacaaaaaggtagtggttctcaaaagggagcccgcaccagatgacctcaaggacttgtttaaacacagattgctagaacccactttcaagtttctgtcccagtaggtctaaatttgagtcataatttgcatttgggacacattctagatgtgatggtccccaggacaatctttttgggaaccagtgtcctggggcagtgcttcacaaattgagatttatcaaaggtataaagaggggatcttgtgaacagatagcttcctaccctatcccagacttaccttgccaagatctccaaaggaagacctaagagtctactttaaaaaaaaaatactatagttttttgtttttgtttttgagacagggtcttgctgtgtcaccacggtggagtgcagtggtgtgatcacagctcactgcagctttaacttcctggggtcaagcaatcctcccacaacagcctcctgagtagctgggactacaggagtgcaccaacatgcccagctagtttttacttttctttttttttttttttttttttttttagagacagggtttcaccatgctaccctgggggatcccagggtaatagcttcccactctatcccagacttaccgtgtcaatatctccaagggaggacctaagaatctactttttaaaaaaaattttaacagttggccgggcacggaggctcacgcctgtaatcccagcagtttgggaggccgaggcgggtgaatcatgaggtcaggagtttgagaccagcctggccaacatggtgaaaccccgtctctactaaaaatacaaaaattagccaggcgtggtggcacacgcctgtaatcctagctactcaggaagttgaggaaacagaattgcttgaacctgggaggcggaggttgcaatgagctgagatcgcaccattgctctctgcctgagggacagagtgagactctgtctcagaaaaaaaaaaattacaacagttttatttattaaagtttttattaatctaaaataaataaataataaagtttttattaatttttttttctttttgagacaaggtctcactcttgttaaggctggagtgcagtggcgcaatctcagctaactgcagcctcaaattcccgagcttaaattatcctctcacctcagccttccaagtagctgggagtacaggctgcgcccccatgccccactaattttttttatttttttgtagagacagggcatcactatgttgcccagactgtctagaatttgtggcctcacgtaattcttctgtctcagcctcccaaagtgctggaattacaggcatgagctaccacacctggcctttattaatatttttattgtggtaaaatatgtataacaaaattgaccattttaagtgtaagactcagcagcacattgccgggcacgatggctcatgcctgtaatcccagcactttgggaggctgaggtgggtaggtcacctgaggttgggagtttgagaccagcctaaccaacatggtgaaatcacgtttctactaaaaaaaaagtatacaaaaattagccaggcctggtggtgtgcacctataatcccagctactagggagggtgaggcaggagaatcgcttaaacccgggaggcggaggttgtagtgagccgagatcacgacactgcactccagcctgggcgacagagtgagactccatctcaaaaaaaaaaaaaaaaaggagactcagtggcactaggtacattcacaatggtgtgcaccattactactatccatcttccattctttttcatcatttctgaatggaaaccctatacgcatgaaataatacctcccattctcctctgcttccaggccctggcaacctctattgctccttctgtgtctatgaattccctgttcatgtttcctcatataagtggaatcatacaatatttgtcattttgcgtctggtttatttcacttagcataatgttttcaaggttcaaccatattgcttttatttatttatttacttttaatagcaatgtgggtcttactatgttgcccaggttggtctcaaactcctggcctcatgcaatcctcccgccttggcctcccaaagtgctgggattacaaacgtgagctatcatgcccagctccatgttgcttttgggatcaaatgcaaacaatcattactgaggccaatgtcaaagagctttttccctatatatattttttgagaaggtttatggcttcatgtcttacatttaagtttttcgtgcattttcaattgatttttgtatataagagtcaaatttcttcttttttttctgttttgcatacggatatccagttttcacgccaccatttactgaaaagactatcctttccccattgggtattcttagtgtctttgttgaaaaatagttgactgcacatacatggagttatttctaggctctctattgtgttccattggtctatgtgtctgctattatggcactaacatactgttttgattcagtagttttgtaatatagcaatgaaatcatgaaatgtgatgcctccaccttaggtcctctttttaaaatttttaatcaacaaataataattgtatatatttaaggggtactatgtgttttgttatatgtatacattatggaatgatgaaataaagctaattaacatacccatcacctcacatactagacaggaacagaaagataaacactgtgtgatcaggagctaagctatgactacatgaagacataagaatgatacatgggactctggggacttgggggaaagggtgggaggggtgagggataaaagactacacattggttaacagtgtacactgctcgggtgatgggtacaccaaaatctcagaaatcaccgctaaagaacttattcatgtaaccaaacaccacttgttccccaaaaacctattgaaataaaaatgataataaatactgcatgatctcactgatatgtggaatcaaaaaagtcaaactctcggcagcagagagtagaatggttgataccacgggctggaggatggggtggagaaatgggaagatgttggtcaaagggtgcaaaatttcagttagacaggaagaaaatttctggacattgattgtactgtatggtgactatagttaataataatgtattgtacatttgaaaattcctcagccgtggtggctcatatcatgcctatgatcccagcactttgggaggctgaggcggaaggatcacttgaatccaggtcttccagcctggacaacatagcaagaccccatctctacaaaaaaaaaaaaaagtaaaaaattagtcagttatggtggtgtgtgcctgtagtcctagccacttgggtggatcacttaagcccagaagttccaggctgcagtgagctataatcacaccactgcattccagcctgggcgacagagtgagaccctgtctcaaaataataataaacactaattttcaaatattcaccataatcccatcaacaattgtatttccatatcctcgcaatctaactatagcccctgttaggactccattaccagtcttggaaccagagtacatgaggctcccatgtcaaggagtcccagaaaagtcttttctctacctcctgaccattttatgcacttgtgtgaatatcaccttgtgttaccagccacgtttctactaaagaaagtatacaaaagttagccaggtgtggtgtgcacctgtaatcccagctactcaggaggctgaagcaggagagtcacttgaacccaggaggcagaggttgtagtgagctgagatcatgccactgcactccagcctgggtgacggagcaagactctgtctcaaaaataataataataatagtaataataataactctttgggaggccgagacgggtggatcacaaggttaggagatcgagaccatcctggccaacatggtgaaaccctgtctctactaaaaatacaaaaattagctgggtgtggtggcatgcgcctgtaatcccagctactcgggaggctgagacaggagaatcccttgaacctgggaggtggaggttgcagtgagccgagctcgcgccactgcactccagcctggagacagagtgagactccatctcaaaaaaataattaattaaataaaataaaaataaaataagaacttaggatagtggaagaagtgtttctgatcccacagaaaggatatagtccctgcttccaccccagccatgctagtatcacttcctatatgcatttctggtgatactgagtggctttaatttacagccaatgttgataatccatctgcccaaggctaaacatagactggttcttattccttattttttaacacctttcagatttttacatattagccaaaaattttatgattgaggaagataacagaaacacaactaattgagaagcttctctgggtactttgggcctcttagagtggggtgctgggttaagtcttatcgcatttcaaaagacttagtgtggatagtgaatttgaagacagaactgaccagaatactgtgtcccacatatcctggtagcagaacacttagatatctgtactcattcattttacaaatgtttgagtcactatgaggtgtctgtcaccataaaggaaaggaagcaatccaggactagtcataaatttgagttggaagtacagtgtcatttataagggtggaacaggtatgataagggtagcttgctaaagaaaagttctatttggggcatgttattttgaagatgattatcagccatgcaaatatatgtttggagctcagaggaggagtctgagccatgatttgaatttgggagttgttagccaatgtgtgtatcagttagctattgctccaatgtgctgcctaacaaatgatcacaaaaatcccagaggcaaaacatcaagcatgttatttagctcacaaatctgggagttgatctgcattgggctccactgagccatttagctactcttgtgtctgtagcagtgccagaagtgctaaagttagcaaaccaaactacacaagcatgtttaaagcctctgctcatattttactgcttaacgttccattgcccaaaacaagtcacatagcaaagggcatgaatatacaaggagtgaggaaatgggggcattaattttctagaatgtggcagtgaaagtcaaagtacttggaccatgggatgaaaccaccttctgaaggagaaagaaaaaaaggatctattgaaagaaaggtcacaaacaggcatggtggcttacatctgtaaacctagtattttgagaggccaaggtgggcagatcacttgagcctaggatctcaagacgagcctgggcaacatggtgaaaccccgtctctacaaaaaaaaaaaaaaatagctgggtatggtggtgtgtgcctgtagtcacagctattcaggaggctgaggcaagtgggtcacttgagtccaggaggtcgaggctgcagtgagctgcgattttatagcacctttcagaatagttttcaacttttataagacaatataaacctaatacaaaacagacaagtatattatgataaaagaaatcacaggacaaccttctcatgaacatagacacagaaatacttttttaaaagtaacattgaatctagcaaaaatgaaaaggctaataaaccatatccaagtgtggtttattccagtaatagatgttgttttaccatatgaaaatcaaggaatatataattcaccttattaacagatttaagaatttttttttccagacctctcaggattgacaaggatttcttaaagactctgataaagactctctttatctagagaaggcactagataaaatctaatgtccattcatgatttttacaaaacaatcttgacaatccaagaataaaacagaattcccttaatttgataaaggttatttataaaaaacttctaggtagtatcatacttaatggtgaaatattaaacacatttccctaagttcagaaacaaggcaaagatattcacattcatttctgttcattattctaaagaaataaggcaagaaaaataagcaaaaaataaagtttagacgttaggtaagactttcttttattggtattaacaggattatatatatatagaaaatccaaaatccacaaagtattggaataaataattgaatttataaatgtcaccagctataaagtcaatatacaaaaagatattgcaattctacgtgctagccaaaaacattgaaaaacaaattaaaaatacaaagcaaaatatactagaaataaattaaacaaatcaagatttctacaatgaaaactataaaacactcttgagaaaagttaaagacaacctaggtaaatggacaattataccatattcatcaactggaaaactcgatattgtaaagatgtcaattatcctcaggttattttataaaaccaatgcaattacaggcatagtaccaaaaattcatttgtgaaaattaatcctgagattccaaaattaatttaggaaacatggggaacagagaaggcaagacaatcttaaagaataaaaaagttggaaggctttcactaccagatttccaaaaatattacaaagcaacataaattaagatagtatggtattgatgcaagaaaagacaaatgaaccaagaggcagagatcacctcagcaaagaggaaaccatggtctctttgataaatctatatacacacaccttgatcctacctcacacgctacaaaaaattattcaaagtagatcacagacctacataaaaaaacaataaagaatctagaaggaaacataggagagtagattcattatcttggtccaggcaaataattcttaaacaggtgtcagatctcaagttgatctttatgctcattaaagattaagcagcaatctttttttttttttttttttgacacggagtctcattctgttgcccaggctggagtgcactggcacaatcttggctacctgcaactccacctcctgggttcaagtgattctcctgccccagcctcctgagtagctgagattataggcacaggccaccacgcctggctaatttttttagtacagacagggtttcaccatgttggccaggctggtcttaaactcctgacctcaggtgatccgcccacctcggcctcccaaagtgctgggattataggcatgagccactgtgcctggccaagcagcaatctttagcaatctaaacacatgttaatggatgacacctgacctttctaaaatgctatctaggaactacctaaccctggctgagttcccagacttcacagttcccacttgctgctaagaccagcataacagctaacattaccactgcttttagatcctacctgcccactccttcctcctcccctctgcatatgccccaaaactgccaggactctatgattcagtcagtgcagactctaatccagtttctggataagaacaggcactaaccctaaacaaatgagagtattacattccccaggccagtgactagagtacagtgggcaagtgagccaatcagagccaacgagattcaattctgatcatcatattggaaccactcaaaaagacaatcactcttttctccctgagactttaagttgggaagaaagtagccagagtttctggggccatctatgaagagacaacctgcttggaagaaacactaatgcaggaggatgcacagccaagacagggagacagaattcaactagataacatttttttagccccaggatttagccatgtctgaagctcgttatacccaaggactttttagtaataaattatttaaaccaacaaattccctttaaagagtgaaaagacaagacagagattgggaaatgttatctgtaatgtatgtatatataatatacatattttatgtatatatgtaatatatgatacatggtttatacatatctatgcatgtgtacctagatatagatatacatacatacaataaaggacaagtaaccagaaggaaacctttcaatttttttttttttttaaaaaggaaccataagtctgggtgcagtggctcacgcctataatcccagcactttgggaggccgaggtgggcagatcacctgaggtcaggagttcaagaccaacctggccaacatggtgaaaccccgtctctactaaaaaatacaaaaattagccaggtgtggtggcacacgcctgtaatcccagctactcaggaggctgagacaggagaatcacttgaacccaggaagcggagattgcagtgagcaagatcacgccactgcactccaacctgggcacaagagtccgtctcaaaaaaaaaaaaaaagaaaagaaatcataaatggatgaaatgtttcaacaggtgccctcaaaaaaaaaaaaaatccaaatagccaataagcacatcgaaaagtactcgaaatcattacacatcaggtaaatgcacactgtctgctggatgactataatcagaaagagctggacaggtgtgtgaaacaactggaactttcatgcattgttttggggattattcgtggaatcgatattttttgaaaactgcaatacctaccaaaactaaatttaaagtctaccctatgattcagtaaattcattcctgagcatatagcacataccaagataaataagcccatacatctatcaaaagaacaattaaaagtcaaaccacacattatgttgagcaaaagaagtcaaaacacataactgtatatattgtattttaacatttggatgaaaatcaagaacaagcacaccaagtcaattatagtaagagtcaaaattgtggttgccctgtggagtaattatcactgagaaagaggatgaaggaacttcctaaagtcttggaaatgttctgtttaccaggacatgtacatacatgaaatgtcattaagctgtacattgaagattagcacacttcatgcatgttagtatatgtataataaaataaaaagtgattatggggaaatagtagagttatacttttaaagagaaaatataataggagggaaatatcacagtagtagattatacttttaaagggaaaatataatactgtagctaaaggtacctgaagcaattcatcttcttacatttaaaaaaaaaaaaaaagcagtaaaatctttcctgtttaaaggtgtcaagtataaatcttcctccattaaaacaggatgataccctgtggatgcttacctcaattaccaagggtaacttccctcactctccacagctcttgcttttgagacttgcgaacgtatttttccccatgaatagcatgacatgatgcgattggactgtgtaagaaagactgcaacataagcaaaatggcaatgccagagcttgctagaaaatccaagaagctgtatctggtgatagctttagagatgctgccttggaagacactgaggtcaagcaagcatttaatgtttggttttttatttcgttttgttttgtttttgagaaagggtctcactctatcactcaggctggagtgcagtggcatgatcatagttcactgcagcctcaaactcctgggctcaagtgatcctccagcctcagctccctgagtagctgggaccacaggtatgcaccatcacgtccagctataacattcagttttgagcaaatattgatcaatgagtccaacagtcagaaaaatgagctgaaaactagaggtcaccaggcctttatacatctgtctctctgtctgatggccccactaaacatagcataacagctttttcttcccttatgccttccaaatctcgtacaaactcttattttagacaagtctaacctagaactggagaaaaaagtgattctgggaaatgtagttaatgtaacacaatttttacactcaaaacactggatccaattcccagccacgagcaaggacaaagaataaaatataaaaatagtatattaaattaatttctgctgaaattactcactagacaataaaagcttttaatagtaaaaatttatcatctcagaaactctaacgtctcttagcaaaaaagaataggaagaaaaatattgagtgggcaagttccattatctgccatgtagactaaaaacaaaacatcaacaaaaatcaatatttggtttttggtttgtcaatattatattggtttgtcaatattataacgactacccatttaaagaacaatgaacattaattagaaaccacttttttaaaaaagaccactgctgcctatacagaaaaaatatttcgtgtcctccatgatccaaaagattttgtaatggaaatcatatttacatcagaaccaaaattaaagcacctcatactaaaaagtatgtggctagagctgaaaaggtaaatttatcaccttcaatgttcctatcagaaaacactggtaatcaacgagccagcattctactttaaggatgaggcactgatcttcatttctagtagagattttcttatacataataagcaatgttcataaaggctttagcacatgacttacatacacagggtttctctaaagtgtcctcaaatcttcaaaacgatgagcaacaatttcctactttcttacattcatagggtgtctccacagtatgagatctcacatgttgcctaggatctgaagctttgcagacattcccatattccttacatttatatgttttctctagtgtgagttttcacatgccttcgaaagtaggcaggacaaacaaaggctttcccacattccttacattcatagggtttctctccagtgtggcttctcacatgccttcgaaaggatgagggacaactgaaagcttttccacattccagacattcaaagggtttctctccagtgtgcattcttgcatgtacagtaaggtatgaagaatgacgaaatgctttcccacattccttacattcatagggtttttccccagtgtgcgttctcatgtggatcctaagggctgagggataaataaaggctttcccacatttcttacattcatagggtttctctccagtgtgagttctgatatgtactgtaaggtgggaggaactaataaaggctttcccacattctttacattcatacggcttctctccgctgtgagttcttaggtgttcggtgagggatgaggaacgactaaaggtcttcccacactccttacattcatactgtatctttccagtgtgatctctcacatgtgctctaaaggacgagggacaactaaaggccttcccacattccttacattcatagggtttctctcgactttgatttttcacatgtgtattaagggaagtgggaaggtagaaggcctttccacattccagacattcatacggtttttctccagtgtgttttctcatatggatacttaaggaggagggacaattgtaggctttcccacattccttacatttatagggtttctctccagtatgtgtcctcccatgtacagtgagttttgaggactcgctgaaggccttcccacactctttacattcataaggcttctctccagtgtgaattcttatatgtattataaggtgagaggaagagctaaaggccttcccacattccttacattcatatggcttatctccactgtgaattcttttgtgtttggagagtgaggaggaacaactgaaggccttcccacattccttacattcataaggcttatctccactgtgaattcttttgtgttctgtgagcgatgaggaacaactaaaacctttcccacattctttacattcatagtttgtctttccgatgtgaatcttcatatgtgccctaaagaatgaggaacagctgaaggctttggtacattccttacattcatagggcttctcttcagtgggggttttcatatgcttcttgaaacaagcaagaaaatggaaggccttcccacattccttgcactgatagggtttgcttccagtatgagacctgatgtgactcttaagggatgaatgatccacgaaggcctttccacactcatggcattcacaggattttacttcagtatttctcttgagtgaatcaagatttggaacttggctgaaagtctgtccatcttgattttcttcataacattcatagatgttctctaccatatgatttcttttaaaaataaaagacacattattagtaataaatttctaccaatttcagtgaatgtatatgttttctgcccttctgtcaagtttaagctgaaagttttcacagagggctctacgacagccaatactgtcactgagttattgactcacgggatttttctgataattgtttacaactgaagtatgtgtcaaacattcaaaatcccggtctcatttgtggaaaaaattaactcatgaaaattctttctcaaaccacaatctttgatctaggcttatttatatatacatatttcttaaatttcatgactttaattttaagattctctcctgaggcactttctctttctcacgaatggcactcacctcaaatgtctctcatggcttttgttctgataatcaataccacaggactcctggttttcatgtaaactggagaaccaggaatcattccttttgaatcttactattttctgttcattggatattttttctccacaaatatcttgtgaagcaactgattcattagttttaagttgagtctcaaaacctgaaacgaaaaaaagtgaaagcttccatgagccaaggacttttagcagagtgactatttcaggactttggtattaataggcacaagggtcaaaatggtaagcaattaactaagaaataattttatgaagattgaaactaacataactaatatagtattaggagaacaaaacagaaattggataaaatgcacatgaccaaatgccaacttacaaagaggaaacgtggaaggtctttgccaagaacaaggaaaatgcgagaggactgataaaaagtcaaaatagtcatctgagctatctgtggaagatgagcttcctcatataaaacaaagtttgtttttgttttttactttaagtttattttttcccccaaccaaaacagtttctcccaagggttcttgccttcccggtgctctcccataaagatgccctggataagttctctcttcactgtctgcaggtcctcctcttgttcccactgggagatcagatggggtgtgtgtagcggataccctgcacaagcagaaaggcatatcacgagggaaaataatgaagaatcactaacatttccatgaaacagaaacaaaactttagtcttctgatattccaaaaatggacaactgtgagtttaactgcaacaaaatgtcaaatttatttatttttttttttaaaaaaaggagaggtggcaggttgggtgcggtgactcacgcctgtaatcccagcactttgggagactgaggcaggcagatcacgaggtcaggggttcgagactagcctggccaacatgatgaaaccctgtctctactaaaaatacaaaaattagcagggtgtggtggagcacacctgtaatccaagctagtcaggagtctgaggcaggagaattgcttgaacccgggaggcggaggttgcagtgagctgagatcgtgccactgcactcccgcccgggcgacagagcgagactctatctcaaaaaaaaaaaaaaaggagaggtggcaggaggaagcagcttctgacatacagaactgatctaatgttcacacctaaacctcaatatcattacaagctggtcagacagtcacaactgggacattttgttctcctatagaatataaataatctcacaaaatactaatcttggataaagttactctgaaatcatgataaaatgaaacaaaacaaggttacctcataattttgtctaaagactttatgccacccacaacatactcaataatagagtattattgaataatactgtcagcaaccagcaatactatccactttctgtcagcaaccaatctaaaatgactgcctgtgtcactaggctgaacaacgtcccctcaaaatttatgttcaaatggatcaacagaaaagcacagtgggttcagaaacagagccacaccaatacagtcagctgaccttgacaaaatagcaaaggcaatacaatggagaaaagctaagtctttcccacaattggtactggaacaactggacatccacaagcaaaaaaataaatctagacacaggccttagacccttcacaaaagttaacgcaaaatgggtcacagaccttactgtaaaatgcaaagctagaaaactcctagaagataacaggagaaaaatctaaatgaccttctgtttggcaatgacattttaaattttttttcttttttttgagacggagtctcgctctgtcgcccaggcgggagtgcagtgccacaatctcagctcactgcaagctctgcctcctgggttcacgccattctcctgcctcagcctcctgagtagctgggaccacaggtgcctgccaccacacctggctaattttttgtatttttagtagagacggggttacaccgtgttagccaggatggtctcgatctcctgacctcgtgattcacccgcctcggcctcccaaagtgctgggattacaggcgtcagccaccatgcctggcctgacatttttaattttttttttaagagacagggtctcactttatcacccaggctgtagtagtggtgtgatcatagctcactgcagcctcaaactcctggactcaagtgatcctccagcctccacctcccaagtaactgggactaccagcgcgtgccccccacaccctggcaatgatattttagataataatgctaaagcatgatccataaaacaaagaatcaataattgagcttcattaacattaaaaatttctgccctctgaaagacaatgtcaacagaatggaaagataagccacagcctgggagaaaatatttgcaaaaaacatatctgagaaggaactgttatcaaaaatatacaaagactgtagcagatatcatacagaaaaaaacaaacaaaatattcaaagaactcttaaaactcaacaatgtttaaaaaaaaaaaagacaaaaaaatgagccaaagacctttacagacacctcaccaaagaacatatacagatggcaaataagcatatgaaaagatgctcaacatcataagtcatcagggaaatgcaaattaaaacaaggcaccactacacacctgttagaatggccaaaatcctgaacattcacaacaacaaatgctggtgaggatgaggagcaacaggaactctcattcattgctggctggaatgctcgctctgtcgcccaggctggagtgcagtggtgtgatctcagctcactgcaagctctgcctcccaggttcacaccattctcctgcctcagcctcccgagtagctgggactacaggtgcccgccaacacacccggctaattttttgtatttttagtacagatggagtttcaccctgttagccaggatggtctcgatctcctgacctcgtgatccacccgcctcggcctcccaaagtactaggattacaggcatgagccaccgcgcccggctggcagtttcttataaaattaaacatcctcttaccataaaatccagcaactgaattgcactccttttacccaaaggagttgaaaacttaagtccacataaaaacctgcacaccaatgttcatagtagctttatttgtaactgccaaaacgtgtaagcaaccaagaagtccttcagtaggtgaatggataaaccgtggtacatccagacaatagaatattagtcagaggtacaaagaaatgagctctcaagctatgaaaagacatggaggaatcttaaatgtatattgctaagtgaaagaagccaatctgaaaaggctacatactgcatgattccaactatatgacattttgcagaaggcaacatcattatggagacagaaagatcagtagttgccaagatttaagagggagggaaggagggatgaattgatagagcacacaggatttttacagcagtgaaactattctgtatgatattataatggtggatacatgtcattatatattcttccaaactcatagaatgtacaataccaagagtgaaccctaatgtaaatgatggactctgggcaatgatgacgtgtcaatgtagcttcatcagttataacaaatttaccactctggtgggggatgttgttattagaggaggctatgcatgtgggagccagaggttatacgggaaatctctgtaccttccactcaattcagctgtgaacctaaaattgctctaaaaataataataaagcctacaaaaaaaaaagagagagagagagagagagagagaagtccacccagaacctcaaaatgttaccttatttagaaatagggtctttacagatataatcaagacaaggttatactggattaggatgggccctaaatccaatgactggtgtccttataaggagacagagacttagacacacaggcaagaaggagaaggcagagaatggaatgatgcatctgtaagtcaaggaatgccaatgattgccagcaatcaccagaagccaggaagagaaaagggagtctttcccccagagccttcagagagaacatggccctgctgatcccttgatttcagatacccagcctccagaaatgctgtgaaggaaaaaatttccgttgtttttagccaccagtgtgtgatactctgctacagaaggtctaggaaactaatacagcctgcttccatagacccatccccaaatcactcaactgaagcacaaatcctgtaataggtcttttctaacaccatcttactaggacatgtaagaggcatgtattcttgcttgctgcactgcaaaataaacccaacttgtttaactataagtgtgttctggtagtctttgggtaaaggacacagatagcagtaaaatcctcaaaatgttcaaactacaaacctcctccctgtgtcctatagtgattgctgaggtttatacccacactttcgatacttaataaacctcaaggctttcaaccacgaaaaaaagcatcagttcaatatacagatgtttattttcttttttcttttttttttttttgagatggagtttcactcttgttgcccaggctggagtgcaatggagcgatcttggctcaccgtaacctccacctcctgggttcaagccattctcctgcctcagcctcccaagtagctgggattacaagcatgcaccaccacgcctggctaattttgtgtttttagtagagacggggtttctccatgttggtcaggctggtatcgaactcctgacctcaggtgatccacccgccttagcctcccaaaatgctgggattacaggcatgagcactgcgcccggcccaggtgtttattttcatagcaaagccactagactgtaagttccttggggtcagtgaccatatctgtcttacttaccaatgtcttcccattcctcagcccaaatcctagaataaagtcaatttagtgagataaaataactttctaaacaactacatgaaagaatcttgccattcttacctagtgaggccaggttctggaagttttccagcatcacatctctgtagaggtttctctgagcaagatccagcaaagcccattcctcctgggtaaagtccacagccacatcctcaaagactactgagtcctaaaacataccacaaattctgttcagaaaggtacaattcctccaatgtgtacaagaggacagatgaggctcacaacatcgaggaaatgagagtcaattcataggaagttcagaagatcccagcatctactctagggctcagtcaacaaatctctctctctttctatccacacataattcatcactgatcaaatcctggcttatagatttaatacttctaaaacactaaattgccaggcaaattgggtcaagcctataatcccagcactttggggagccaaagcaggaggactacttgagcccaggagttcaagaccagcctaggcaacagaacatagtgagaatcagtctctactaaaatttttttaaaaaatagctgggcgtggtggcatgtgcctatggtggcagctactccggaggctgaggtgggtgggaggattgcttgagccacaaggttgaggctgcagtgagcacgaccatgccactgcactctagcctggacaaaaaaaaacaaaaacaaaaacaaaaaaacattaaatttatctccccacaatctgatgccaatgagctaggaaaaaacaaagtgtttttcctaccctcttacatagtcactcaatactgtacagaacacttctgacaccagatgtgtgggggatattttccacaaacaccaagcaattccccagtggacaccagctgggtatcctacaacttgcttctgatactatctacctggagattccacaggttggagattccacaggaggtcccactaaactgcctcccacttcagatgccaatcccaagttaaaaggctgtcaattatacttctgactggctaaaatcagggctcctactaccctctccttgagtttgattaatttgctggaacaactcacagaactcagggaaacatgtttactggtttatcaccaaggtcattacgaagtacacagataaaatagccagatgaagagatggacaggccaaggtatgctgggaaggggtgcagagattccatgccctctcctggcatgccaccctccgggaaccaccacacgtccagctatccacgagctcctcaagccagtcctttgggtttttaaggaggctccatcacaggcatggctgatttaagtcccaatcctctgatcttgcctgggtctttctgaaccagcccccattctgagtctctctaggggcttccagacaccaaccatctcatgagcacacaaaagacgctcttattgctctagagattacaagggtttttaggaactctgtcctaggaaataggatgaaaaccaaattgttttcttttttttttttttgagatggggtctcgctctgtcgcccaggctggagtgcagtggcgcgatctcggctcattgcaacctccacctccctggttcaagcaattcccctgcctcagcctcccgagtagctgggattacaggcacgtgctaccatgcccagctacttttttttgtatttttagtagagacagcgtttcaccatgttggccagactggtctcgaactcctgacctcaggcagtctgcccaccttggcctcccaaagtgctgggattgcaggcgtgagccaccgtgcccagccccaaatatgtatttcacaatatcatagatggtgaccaatgccagtcttatgatggcctagaaaagtccagaacatattgaagaaatgagaaaaatgctctggaaatgaaataatttccacattgacatcatcgattccttattacagaaataacttcacctgttactttattcccaccatagcaatcactacaacattaaacacagggtcaaatctagatgggattttaatgaataaaaatacaccgagagaaaagcagcctttcatttttttccccctcacaaaactgagaggcccaggagactgcataagcacaattttgaagccaggcccacagctggtcatactttcttgtattctaggccagtggtcagcaaactatggcacatggactatatccaagctgccacttgaatgcataaatacagttttattggaacacaataaaatgtgtttatgtactgtctatggctgcttttgcaccaaaatggcagagctgaattgcaatagaaacactacggccggccgggcacggtggctcatgcctgtaatcccagcactttgggaggccaaggcggacagatcacgaggtcaggagattgagaccatcctggccaacatggtgaaaccccatctctattaaaaatacaaagttagccgagagtggtggtgcatgcctgtagtcccagccactcgggaggctgaggcaggagaatcggttgaaccagggagtcgaaggctacagtgagccaagatggtgccactgcactccagcctggcgacagagcaagactctgtctcaaaaaaaaaaaaaaaaaaactatagccttcagtgcctaaaatactatgtggtccaatacagaaagagattgctggcttgtgccctaaaacactgagggagacctggtacaatggaaatattcttttggacaattatcaccttttacttacctgtattctatttttctgtaactcagcagtttttctttcttcctccatgtcgccttcatgaagaaaagcaggatattgagaagttagaattaaaaaaggtgacatgagaatccagacctccccaaaattcccacactcatgagcctggatgttgcagcccatcaattataagtaacaactcccctcaaaacacatacacacacacacacacacacatgcacacacccaagacacccaagtaaatataccctgctcttgtgggaaagtggaacaaccttacgtccccctagagatacaaaacagtgctctggtccttgttgatcataaagaagaggttaagagtgctattttgtaagttaactgaagactagaaaagtctggctgtcaatctgcccatgataacaaaaagtataaaatgtatcagggagtatcttccaaaacatgaataaacactccccatctcaaattcaagaaagcactgatttatatgccaggcttctgggagttccactcccgatatttcttacttctgcaccccttggctggctaacaggctttgctgctcagccctagaccactgcccctgcccccatgagctgcagggttccccaaaacctgagaaagagcatcagcctattttttttttttgagatggagtcttgctctgtcacccaggctggagtgcagtggtgtgatctcagctcactgcaacctccacctcccgggttcatgccattctcctgcctcagcctccccagtagctgggattacaggtgcacaccaccatgcctggctaatttttctgtgtttttagtagggacggtgtttcaccgtgttagccaggatggtgtcaatctcctgacttcatgatccgcctgcctcggcctcccaaagtgctgggattacaggcgtgagccaccgcgcctggccaagcatcagcctattgaattccatatgctggaggcagagaaggccgctatgctgtgatacacatgctaaatctgcctgcacagtacagtagtagcagaataagaatacttggccaagcatggtggctcacgcctgtaatcccagcactttgggaggccgaggtggatggatcacgaggtcaggagttccaaaccagcctaaccaatatggtgaaacccctcctttactaaaaatacaaaaattagccaggcgtggtggcgcaagcctgtaatcccagctactcaggaggctgaggcaggagaatcgcttgaacccgggaggcggaggttgcagcaagccgagattgcgccactgtactccagcctgggagacagagcgagactccatctcaaaaaaaaaaaaacacttgacctgtgtcagccctgatgtggtatctgcagtgctgtttcacaaatttcaaacaacgacatgttaacagttacttccactgcagtggaacaagtagcattttaaaaagccaataaaaaactgtaacattctttgctgtattagtaacaatatatgccatctggacaaccctgatgtgagaatgactttgcaaagaaatggccacattttagaatatttctcacagaagctctgcaaatcaaatattattacaaccagtttagaattatcttagaatgagtcaattaaccacatcttcaatattacccaattagacagctgctgaggcagggtatgaatgcaggcctatttgtcttcaaaacccaaacacccagtgagtacatttttgaacacataccttaaattttaattgtttttaagccccttattccctagttttaccaggatttagcctagaaccctattgggcactacagagagtggacaaatgaagcattctaatcaaatatgctgtgcgtggtagctcatgcttgtaatcccagcactttgggagaccaaggtcgggggaatcacatgaggtcaggagttcaagaccagcctggccaaaatggcgaaaccctgtctctactaaaactacaaaaatcagccgggcatggtggcgcacagctgtagtcccagctactcaggaggctgaggcaggagaattgtgtgaactcaggaggcagaggttgcagtaagccgaaatcacaccactgcactccagcctgggcaacagagccagactctgtctcaaaataaataaaataaataaataatcaaatatgttatctttgagctccttttcctaaggcctatgtcttgggcaacgatgcttcccttatagcccttacctccttcgtttcatgtttatttaggtgacatttatcctgaccctactacatgaagtcacaaggaataaggcatagaaaaataaaaaagaaaaatcctgaagcaaatgaatgttataatattttgggtaagacattaaacaaaatacatcaggtagagatacatgctatataaaaaatgtagcacattatagggataaggagacacgtaacatatttatctttagcaagtcaggacaggtaatgtggcagggtagaagcagaaaattaaaataactatttcagatcatgctggaatttcagagggtttagtatatctattatatatttataagcattatcaactcctagaggaaaaaaaatcagtactggccaggcacggtggctcacacctgtaatcccagcactttgggaggccaaggtgggtggatcacaaggtcaggagttcaagaccagcctggccaagatggtgaaacccacctctactaaaaatacaaaaaaattagctgggcatggtggcaggtgcctgtaatcgccactacttgggaggctgaggcagagaattgtttgaacccaggaggcagaggttgcagtgagccaagatcacgccactgcactccagcctgggagacacagcgagactctgtctcaaaaaaaaaaaaaaaaatcggtattaataggctagactattgatatataaagttgaataaagaccagcataaaagtttagaaagaaaatagaaaataatcttttttaaaacatagtaaacaaaatcagaaaagctaaaaaagcatcctttgcaaaaagaaaaactaatgaaactgacaaactcagctttttaaaaaaattttttaatttaatttattgtttaagacagactctttatgttcccaggttgatctcatttcctaggctcaagcgatccatctgccttagcttcccaccagctgggactacagatatgcgccactgcagccagcaacagactcagcaattttaagagcaacagggcataaacaacaacaacaaaaaaaaaatgaacaagaattaatcataattacagatatcataaggagaatatagaaaaaatttaaggaataaatatgaagatgcacaggtaattaatgaatttctagaaagtagtacaactttcaagcagtgatctaaaacctgattacacccagtaattaaagaaaaaaaaatcagcggtttaaaacacggtcaggccgggtgcagtggctcatgcctgtaattccagcactttgggaggcggagagcccatgagttcgagacctgcccgggcaacagagcgagactcctattttctaaaaagaaataggaataaagaaaggaaaaaaacctacaaacacctacagcaaacatcctatttaatggtgaaatgatagaataattccctctggaatcagaaacaagacaggatgtaaattacatgctattctgtcggacattgtactggaggtcctggcaagtgcagtaaagaaatgaaaagaaatggaaactgcaaggaataaaaagggaaaagattgaaactgacagatgaccaaattttctgtgtgaaatttaaccaatctatagacaaatgattcaaatgcatcattaatgacaaaatgcatcagttcactttcacttgaatataatgtatcaaactgatgtccacaggcagaatataatatccagagaccaaatactatctttttgtttttttgagacagtgtctcgctctgttgcccaggctggagtgcagtgatgcgatctcagctcactgcaacctctgcctcccgagtagctgggaacacaggagagcaccttttattttacttttttttttttttttttttttggtagagacgggatcttgctatgttgcccaggctggcctcaaactcctgggctcaagcgatccgcccgcctcggccgcccaaagtgctgggattacaggcgtgaaccaccgcgcttggcccaaacactacctaatgcataaagaggggacaggaggggaccgagccgaggcaaatgtcaccccgtgctcacccgacacgccgcgatccacagatcagctcacagagaacgaggctgaagcgcttgtccttgagacacgaatggcagagatgctcttcctttctggaaagagagcaaaggatgctttcggaggctgatgaactacgacattggttctccaactctcgcctgcatcagaatcaccccgatttctgtacccagaccagagttcccgattcagtgagtttgggaccagccgcggccacaggggcagctgacccgggctctctgaggaggcgccgcggcggcgggaggccccgggcgcggggtccggacaaggagtggcggggaggcagcccttagaccgccgattcccaaacccagccctcggtctcccgcggacccgacccggggcaggcagggcggggcggggcagggcaggacaggaagcgggcggaggcaaaaatgttcctcagacgcgggcggaggcgtagggtgacaaggctgtcgactcgcgcatgcgcagaagcacacttctgattcctctttcggcgctgcaaatggcgtatggggcggggcctgggaagcgggacttgaggtgaagggggtggagcaggtaggagcgggatgcaaaggagcgccaaggctggttccagccgcaagtggatgagaaatcctagtttcttcatgatttggagtaaacagagaagaaacagaaccctgaactggacttgcatgactcggcctgaggggcggaactggggctagacctaggggcgtggccttttaaatactccaaggggcggggctaaaggtggaaccagattgggagcggggcttggtagaaattcctagggggcggagacgagggctgggcggggcttaagtgacaaggcctagggatggggctaaggctagggcttcccatccaggttctcagctaccacggatacaggatgctcatcgatcgggtttctacctatcctccacgttgctacagtcctgtacacaggacacatatatttgcagctctaataggaaacagactctccttgacactcactcagtccttttgggccttttagttttccctttcattgttgtattgataacttctcctgtagagggaagccattgataattatttaaatagaacctttttcctggaaacttgctgaattctgatagctgtcagtttattatttgaaccatcaaatataaatattttctctgcatattttcattgttttaatgtgtataactcatttctttatgtgaggcaatgtctcattctatcgcctagactggagtgcagtggcgcgaccatggctcactgcagccttgacttccccagctcaagtgatggtcccatctcagccccccaagtagctgagaatacagtcgcgtaccaccccacccagctattttctttatttttttgtagagatgggatcgcactatgttgctgaagctggtctcaaactcctgagctcaagctatcctctcacctcagcctcccagagtgctaggggtacaggtgtaagccaccacacccagagtcatttctttttcttattgtttgtttagggcttcctcaactataagtcggaaagaaattaagcattcttgtcttggtcggtaatgattaccaaagttcctcagtaagctgtttacaacaggttgcacctcttatcaagttaatctttttaaaccaggtttataaagatattttatcaataattttttatgaacactatcaaatgtttatgcaacaattgagttgataacataattttgctcctcttagtttataatatgatatccatataaaatatttaattttaggcaaggcgcagtggctcatgcctgtaatcccagcactttgggaggccgaggccggtggattacctgaggtcaggtgttcaagaccagcctggctaccatggtgaaaccccatctctactaaaaatacaaaaaattagctgggcatggtggcgggtgcctgtaatcccagctactcaggaggctgaggcaaggagaatcgcttgaacctgggaggcagaggttgcagtgagctgagatcgcgccattgcactccagcctgggcgacaatagaaagactccatctcaaaaatatatatattcaattttatatatccccaatgaatctatacttttagtaaaatggtttctgagtttcctagtttgcttttaaatgtctccccaaactctaaaatataaaaatacttcctaatttacttccaaattgtactgctttttaaaacgtataattctttactgctcagggaatgtattttggtataatatgaggtagagatgtgttatataagtgaaccacaggtggcctttctgtattggtccctaggttgttcattacttcttcactgcggcttgaggtcaccttcccaatgcctgtccctggtgccctagccagctccctttcatcatctatgttttttaagtgtaaatctttttctattatgaagcattatgttctcattgtagttttttattttaaaggaaaagtataaggaaaagacaaacaacattcagaatcccagcagtgtttgaattttctgtatttcctttctgccttctttgtacgcgtgggtggcaagccacccaggtgccaaggcaagagaccgagggcacaagctgttccagtataataaagaaaatatatagaataagagtagttatactagaaatagattatagatatgattgtatatatcattaatcatttgtagcattactctttattccaatattataataatctttgttctacaatcataacctaggaaaaaccaggccatacagagataggagctgaagggacatggtgagaagtgaccagaagacaagggtgagccctctgttatgcctggacagagccaccagagggctccctggtctagcggtaatgccagcccctgggaaggagcccgttacctagcggaccttggtctagcagtagcgtcagtgcctggggaaggcacccattgcttagcagacagggaaagggagtctccctttccccgggggagttagagaagactctgctcactacctcttgcggaaagcctgacatcagtcaggcccgcccgcagccatccagaggcctaaacgtctccctgtgatgccgtgcttcagtggtcacactcctggtccactttcatgttccaccctgtacacctggttctgccttctaatcagcagtagcggaattagtgaaagtactaaagtctttgaaatgcatagaagaaataatggcgtaagctgtcctctctctctctccacctcagctgccaaacagggaagggccccctgtctggtggacacgtgactcgcgtgaccttacctatcattggagatggctcacactccttaccctccctccttgtcttgtatccaataaataacagtgcagccaggcattcggggccgctactggtctctgcaccttggtggtagtggttccccggacccagctgtctttttgtctatctctttgtcttgtgtctttatttctatgatctcttgtctccacacacgaagagaaaaacccacagacccagtagggctgcttcctacagtacgcataacagtaggtttttttattgtttgtttgtttttgactcagtctcgctctgtcgcccaggccggagtgcagtggtgcaatctcagctcattgcaaccttcacctcctgggttcaaacaatcctcctgcctcagcctcccgagtagctgggattacaggcatgtgccacaacacccggctaattctgtatttttagtagagatggagtttctccatgttggtcaggctggtctcgaactcctgacctcaggtgatccacctgccttgacctcccaaagtgctgggattacaggtgtgagccaccatgcccggccaatcagaagtaatttcaatttttcatctgccatgcaaaaaaggtgagggattgcaaaggcaatagcctctggtccttttgttacttgggcatggaaagtggggtttccttttgatctagttctagaaagtcagcgtgattggccttaggttcccttcctctagaccctattctacctcaacactgaaacttggaaaggaagcttcttcctccttccttgtcttccagcaccctacactggtaatgggtaaaagagaaatatttataaggcccatctccattatcacaaagcagaaaaaaaggacaaatttgtagcataagtaataaatctataactaggacagtggtcaaagcatgttttgccttggttttcctttactgacagaccaggtcctagcaacaccaagaattggttcatggtatccagactgcttttcctcccaatttgtggcaggtcaattctccctgacaatcacacagacaggcctgcatgacagtcacacagacagacctgcacagcacttctgttacacagacaaatttccacaaaactgccttaacattgagcaaatagttaaatctagggaaatcagtgcccagacatcaaagctagaaatgaaacacatggtcagttgaagcttcacacgggcttctccctaacctggagcaagccaaaataatacagacagtcttacattcctagtaccagcacgtgtctcaggtggacgaaatctgagatgagtcaagataacagaggcagctgtttgaatagattcactggagagtctaaggcagctctctggacccaagctgtaaaggagataatgtgtccagagttggttcctgctggtgggtttgtggtcttgctgacttcaagaatgaagctgcggacctttgcagtgagtgttacagctcttaaagatggcatggacccaaagagtgagcaacgtttattgtgaagagcgaaaggacaaagcttccacagcgtggaaggtgaccctagcgggttgccttgctggctgggggggggtggccagcttttattcccttatcgacccctcccatgttccgtttctgtcctatcagagtgcccttttttcaatcctccctgtgattggctacttttagaatcctgctgattggtgcgttttacagagtgctgattggtgcattttacaatccgcttgtaagacaggaaagttccccaagtccccactcaactcaggaagtccagctggcctcacctctcaattatccctctaaacaggtcacccaacagctgttgggaactgggtgatgaccgctctgggctacttcctgccggataggggtgaagaaggggccctgcagttgtagtgtcctccagaggggaactctctaggccagtgaaagggccagtgggtcagtccaggggtcctcagtagaagttctgagttgagctcatttggggttccatttgtaagaccctctgtagcttgatggcctcgatcctggaggaaacaaatttgacaaggttgttaaaaatacaggacccaaaggcaagtaatagcaagatggctgtcctgagactgagaaaggggagaagccatgttgcccaactccagaggttggtataagagtttgaaaggcgttgtctgatttcagaagccttttcctgtaaacgataagcggcatctcatactatcccttactggttagtgtaaaagcaacactcttcccttaagaatgtacagtcctcctttctcagcagtgaggaggtctaggcctcagcggttttggacagtcactgccactaaagagtctatttgggattgtagagtaacgatagattttatttcttgcaaactgtttgaaaaatcttttgagagtgtgtggtaataggataatgaagtagataaactggctattccagttcctgtagcagtggccattcctaaccctataagttggagtattagttgtatggccctgcactgacaaacttgagctttgaggggcactgatagggtctgatttcctggggcaatgtcaatgttgggacttaggaagactaaggtgcaggtgcgtctccagttggtggggaggcagatataggttgaagttccacatgggaagaatatgccttggctgggtagacagaaatggttgtgtatgttaaaaaggcgtgtgagtttgttcttttcattttcccatactcctggagtacttgtcaaggtagctccagtgagcagctggaaaggggtattgggagcaaactgagtggctccctgtgttctattttcccattagagaaaaaaccattttgtatctactaggaaccattcaagagagtgattgaaagaggggatgagaaggcattcattagtggtgggggcgctgctgcaggggttccaggggtgaatggtcatgcagggaggatgtttgccattacaaactgtttaagcagggaggaggtgatgattttagggggccctgagaagcagacaagccatctgaatggagctgtttgggtgactcggaagttactatgatcagttggggcttgaagttgtagggtataattacactgatgggatagcaggtgtcccaggggcaggcctgataacaggttccattggatgcataaaggggcttggaaagttaagatggtattcgcggttacagggccatgtatgggtttttcattgctcatgtaatagatgaagttggaaatgtaagagcgtaaaagctggattgtacgtcctgttagggtatttttggtcctatcggagatggggaagttggctaatgattgcatatttacaagttggaaagggtattttccttcataacgggtgtccaaagtttaactcgggtgtggtgaatccaagattccacttctgccaccttaactgtagtgggggtagagaggattacggagtatgttccttcccacaaggaatccatagatggggaggtagaggggagggacttgaccaacactagatctcctggttggaacaactctgttcccttgtcttcgtgacatccttcgggtaggtttttaagattttattgatattttgccaaagaagttatatctttgaccaaactggccatttcctgataaagtagaaggtcattagtgagaaaaggtcatccatacagcatttcatatggactgagccccattttgtgaggagaatttcggattctcaacaaggccatgggcaacagagtaggccatgggaaatgagtttcttgtgttagtttccttaggtgcctcttgagtgtttcatttgccctctagaccttccctgaggattgtggcctccaggtgcagtgaaggtgatattttatccctagtgccctggaaattccctgagttaccgtggctttaaaagccagactgttgtcgctttgtaagctttggggaagcccaaatctaggaattatttaatgaattaggtctttaaccacttcctgaaccttctctgtcttgcaggggaaggcttctatccaatttgtaaaagcatcaacacagaccaacaagtattgaaatccacttgacttaggcatatgggtgaagtctaattgccagtcctctccaggatagtgccctattctttgttccccaagaggggccttacaatgaaccaagggattattcctttggcacacctcacaggctctgactacttgttggatggttcagaggagatttgaccctgtaaatagggatttagctatttgatgagtgctctcaatacccatatgaaaagtttggtggagggtcttaagtattttccactggctggcttcgggtatgagtacctttccctcttctgtcattaaccacaccaaggggagaaaactatgcccccgtgaaagtcctcattctgtttctgtcggagaatactggggcttaatctcctggagagggttgttccataacaagggtccttattatgggtaataataacaatatggaaccttgttccataacaagggtatttctaatgggaggttctgcctggcagcaattttagcctcagcgtctgcctgacagtttccttctgccttttctccttcacctttttgatggcttcggcagtgtaagactgccacctccttgggtttttgcacggcgtgcgataactccatgattttcttgtggtatttaatgggggtacccccagaagttaggaactccctttcattccatattgcagcatggccatgtaagattagataagcatacttgctatctgtgtacatgtttattcttttttcctttcccagttctaaggctcaggtaagcgccactagttctgctaactgggcgctggtccctgggggaagaggcttactttcaagtactgttacatcactaactatggcataacctgcctttcatatcccattctccacaaatgaacttccatcggtatataggttaaggtcaggattagctaaggggacttctaagagatcctcttgggcagcataaggctgggctacaatttgttggcagtcatgcttgattggttccccatcctctgggagaaaagtaacagggttgagggcagcacatgtgtgtatttgaagcaccagcccctcaaggagtagtgcctggtatctaagcagatggttgtctgatagctataaatttcctttggcacccagtatgccatttacatcatgagtagtccagagggtgagatcctttccttgtattattttgatagcctctgatactaagatgaccaccgccataactacccataaacagtgaggccagccttttgctactacttaggtatttccttacttaggtatgccactggttgtggggttgttccacgagtctgagtaaggactccaagagctattcccaatgtataaagagaagttttgtgacgtataaagagaagttttgtcctgtgagaaggcttaagactggagcttgtactagggcctgctttaaggttttgaaggctgtttctgcctctggttcccattctactagataagtatttgccctctgggtgtccttgattagagtatagagtggcctggccaactcgctatatctggggatccatagttggcaaatgccgatgatcccaaggaacacccacaactgctttaatgtctttgggtgaggaaaagccaatataggctgtatttgttctttgctgagggccctggttcctctggctaagattaggcctagatatctgacatgctgtaggcagagctgggccttcaatttagatgccttgtacccttgattagctagaaagttcaagagatgtagagtagcctgctggcatgaggcttccgaactggtagccaaaagtaaatcatccacatactgagggaccagagtgcctggacttgagaagtggcctagatcttgggccaatgcctgaccaaagagatgaggactatccctaaactcttgaggcaagaccatccacatgggttgggaagtgtggtctgtgggatcctcaaaggcaaagagaaactgggagtcagagtgcaggagaatgcagaaggtggcatccttgaggtccagaacagtgaacaattctgcttcctctggtatttaagacagcatggtaaatgggttgggtacagctggatatagaggaattactgcctcattgatgagtctaagaccttgcactagtctccactgaccatttggtttttgtactcccagaattggggtgttgcagggactgctgcattttcttactaagccttgaacttttaaatgtctaacaatatcctgtaatcctttatgagcttcaggtcttaagggatattgcctttgataaggaaaggtagtggggtcttttagcctgatttgaactgggtgggcattttttgcccttccaaattgtccttccaatgcccagacttcagggttgttccctcttcaagtaggggacaacaaatgggtaacttgttccccatattcatgtaaataatagctccagctttggctaatatatctctccctaataagggtgtagaactttcaggcataacaagaaaggcatgtgaaaagagcagtctcccaattacaaatgaggaggtgggagaaatacctggttacaggctgtcccaagattcctcggatggtaacagaccttgaggacagccatccagggcaggagcttaacactgagaaagctgtgccagtgtccaggaagaagtcaatttcctggccctcaatggttaaacttacccgaggctcagtgagggtgatgacatgagctggcacttgccccgggcaccctcagtcctgttgttggatcatctggttgggggcttctggcctagagaagctttgtcctctggggcagtgtgcctgccagtgattgccttggcatagtggacatgggtgagggggcggcttgtttctcattggacaatcttttttaaagtgtccctgcagaaaaaaaaaccaaacaccgcgtgttctcactcataggtgggaattgaacaatgagaacacatggacacaggaaggggaacatcacacacgggggcctgttgtgtggtggggggagggggagggatagcattaggagatacacctaatgttaaatgatgagttaatgggtgcagcacaccaacattgcacatgtatacatatgtaacaaaccttcacgttgtgcacatgtaccctaaaacttaaagtataataaaaaaaaaagtgtccttgcaaaccacactgataacaagccctactgggtgattggcctgctccattttctgtcctctctgaaccaccaaggtttgtttgtctgagggccatgactaagtctgcggcctttctcttatctcgcttttcctttttggcctgttcctcttggtccctattatagaacaccaaggttgccaggtttaataatgcctccaaattttgttcagggccagggctagcttttggagctttctcctgatatctgcggctgatttggtaataaacttatctttgaggatcaattgaccctcgagagagtcaggtgacaggagagtatattttcttaaggtctcccatagtcactcaaggaaggtggtaggattttcttcctttccctgagttatggtggacttcattgaatgattcatgggcttttttctaattctccatagtccttctagaacacaggtcaacagatgtttgcaactccagtccccatgatctgagtcgaggtcccagtggggatccatactggggatggcttgctgacccatagggaatttgtccctttcttcagctgtcattctatcatttacttgactaagataccaggtatctccaaactctcaggctgcagctaaagccgcattcttttcattaaaggccagtgtttgatctaacaatagcatgacatctctccaagtgaggttgaaggtttgccctagaccctgtaggacatctatatacctataaggatcatctgaaaacttccccaggtctaccttgatctgctttaaatcagagagggagaaggggacatgtacccgggttgggccaaattcccctctccctacagcttgaaggggacaaaaccgatagccggcggggggggggtgggggctgtggtaccttggagatttctttgcttgtttctttctgggtgggggagattagaggaggcttatcagtttccattggctagaacaggaccttccattctgtatttgtcctgattggctagcaacttaggactttttaaaagaggcaaaggcagaggagaacaaaggatggaggaagtaacttgtgggatgctgagaaaggtaaaaacaccttcagataaggaagaggaacagactatgacctaatgcttgcttggaccagtataagcatgccagggcaaatatttaggctaaattgtgggagctaagaacataaagtacactgatttctttattacagctagcagatatttaagaatgttagtgagaggtgacagtgtgctggcagtcctcacagccctcgctcgctctcggcgcctcctctgcctgggctcccactttggcggcacttaaggagccctttagcccaccgctgcactgtgggagcccctttctgggctggccaaggctggatccggctcccccagcttcacggaggtgtggagggagaggcactagcgggaaccaggctgcgcacggtgcttgcgggccagctggagttccgggtgggcgtgggcttggcaggcctgcactcggagcagccagccgtccctgccccgggcaatgagggtcttagcacccgggccaatggctgcggagggtgtgctgggtgccccagcagggccagcccactggcgctgagctcgatttcttgcgaggccttagctgccttcccgtggggcagggctcgggacccgcagcctgccatgcctgagccttccccgccaccacgccctcctcccccccgccctcctctcccccccgccctcctcccccctgccaccctcctcccccactcctcctcccctcctccccccgccctcctcccccccaccctcctccccacccccctccccacccccaccctcctctccccctgccctaccccccgctccttccccctcctaccccctcctcccccgcctcctcctccgtgggctcctgtgcagccggagcctccccgacaagtgccgccccctgctccacggcacccaatcccgtcgaccacccaagggctgaggagtgcgggcgcatggcgcgggactggcaggcagctccacctgcagccccagtgcaagatccactgggtgaagccagctgggctcctgagtctagtgggaacttggagaacctttatgtctagctaaagtattgtaaatacaccaattggcactctgtatctagctcaaggtttgtaaacacaccaatcagcaccctgtgtctagctcagggtttgtgaatgcaccaatcaacactctgtatctagctactctggtggggacttggagaacctttgtgtcgacactctgtagctagctaatctagtggggatgtggagaacctttgtgtctagctcagggattgtaaaggcaccaatcagcgccctgtcaaaacagaccacttgactctaccagtcagcaggatgtgggtggggccacataagagaataaaagcaggctgccccagccagcagtggtaacccgctttgatccccttccacgccgtggaagctttgttgtttcactctttgcaataactcttgctactgctcactctttgggtccacactgcttttatgagctgtaacactcaccgcgaaggtctgcagcttcactcctgaagccagcgagaccacgagcccaccgggagaaatgaacaactccagacgcgccgctttaagagctctaacactcaccgcgaaggtctgcagcttcactcctgagccagcaagaccacgaacccaccagaaggaagaaactccgagcacatccgaacatcagaaggaacaaactccagacgtgccaccttaagatctgtaacactcaccacgagggtccccggcttcattcttggagtcggtgagaccaagaacccaccaattccggacacattagtacaggtctttgaataaattttgcttctaacagaagttactatttattcctaattagatgggcaggaaagtctttgaagaggaacctctactttactttttactgtagagagagtagtctttgatcttggggagatggggtttttccttttggtttagcttcaggaagtttgtgttaattggccttaggtgccctgcccccagccccaggtgtttttcctttgatttaactttaggaaattatcacgaattggccttagattccccgaccccagatcttggtgttttcacttttaggaagtccgcatgaatcttatctatgctcttaactacgtcctaatttttgtgttttttgtcttttttataggaatagggttttgccatattgcccaggctggtctcgaactcctgagctcaagtggtctgcctgcctcagcctcccaaagtgctgggatcactggcgtgagccatcaggcccagcctctatgtgctaatttttgaacaaattccaataggagcattctagtctctgagtgtgagatgaccaaaaatcaagcccttgtgaggctgaatagagtcgggaggcagggaacttaaggctgtttcaggccgacttcctagaactaaattgaaaggaaaaccctcactttcctcgcctaaataacaaaaggaccagaggctactccctttgaccttttctgctggcagataggaaattggctgtctgcaacaaatcagactgatggccggttgagtcttcatttgcatagaagtgtaactttgtaacgtcgtaacttcaccctagcctttgattggttgctttttgcaaccaatcagatgtttgcacaggagtgtgacctttgtaacttcagactctggttggctgctttctgcaaccaatcagactgaacgcgggctaccgcttcatttacaggaggtgagcatgaagtggccaatgggaaaattctaggaggtattgggactcatgaaggttctgtttcggagcccttgagctgccgcttggccagttcccacactgtggagtatgctttcgttttcaacaaatcccagctcttgttcttttgttgcttcattctttctttgctttgctgggcgttttgtctaattctttgttcaaaacgccagtaacctggacagcttgcagtcaagaccccctaccggtgacacttgcgctcttcggggaggtaaacagcatttcctctcagctctgggttggaaaaagccgcagcagctgatgggcccgggaacccgaggccccgccccctaggtggtcctagcctttgcgcgtgcgcggcgtgtctgcgtgggcgcatgcgcataacggccgccatcttaacagcgcgttcccgttggcgtctgaggtaagtttttgtttctgggcggcgttcggtggtgtcccggtgcagccacgcgagagtagaagggtggaaaggggaggtgcccagtgaaatggagcctgtcccgtgcactttcgggcatttcgagcatcttgtgggctctcccaagtcgcggcccctcctctgagagccacagtcaggtctgtcctcaggggtcgaggcggctgcgctggggcctcggcccgggaggaggcggggggcacggcctttccattttccctgctcccctctgcagaagcctcatagggcccggcgcggcggctcacgcctgtcattcccagcgctttgggcggattgggtaggaggattacttgaggccaggagttcaagaccaggcagggcaacatagggagacccccccccccaaccatctctaatggaaaaaaaaaaaaaagtctccacatccagcgttgtgccttttctctataaggaacagcatctctgccttcctgttcacggtgaccttcgcttggtgtcctcctggcctcagcaacctgacaattctgtcgtgtcccggtgagcacttcatgcacttgttctggctgtgggtgtcgggtcttgaagtttaagttgtgtcgaggtggaaagaaaccttttcaggtggttgttcgagagcacatggatctgataccatcgaatgcatgagtggatgaatgcacataactgtaaaatttaccaccaaggaaaaacacaggactactcaactgtggttccaggccatcacctagatctcactctagcgccctgtagattcccccagaggttcaaaacgagggcatccccaggaacacggtgcgggctgatttactagcaggagggattgaattgataatgaatgcgaagataacttttgacaggtgggttttctaccagttactcatttgaaagtcttactgagggcggggcaaggtggctcacacctgtaatcccagcgttttgggaggctgaggctggaggatcgcttgagcccaggaatttgatgccaacctggaaaaaatagggcaagcctctgtctctactaaaaataaaaaattagctgggcatggtggtgtctgtggtcccatccactttggaggccgagatgcgaggatcacttgagcatgggaggtcgaggctgctgtgagccattattgtgtcactgcattccagcttaggcaacagagtgagaccctgtttcaaaaagaagaaaaaaaaacaaatactgatctagagaacatctgtagctcgagtaaaacaaatgtctttagtccaggtgtggtggctcacgcctgtaatcccagcatgttgggaggctgaggctggcggatcacgaggtcaggagtttgagaccagcctggccaacatagtgaaaccccgtctttactcaaaatacaaaaaattagccgggcgtgggcacctgtaatcccagctactcaggagcctgaggcaggagaatcgcttgaacctgggaggcagaggttgcagtgagccaagattgcacccttgcattccagcctgggcaacagtgcgagactccgtctccaaaaaaaaaaaaaaaagtctttaacccttaactacattcactagttgttaagatttgtttcatttttttgtatatgtactttatcatgagccatttaaattggaagtgaatgaactttccccttttaagcgtgtatctcaaatacctcctgaaagtgaagacaagcttaaaacaagacttcattgtccatccccacccccaaatcaaatcagatttccccagctgtccaaaagtcaccatagtcaccattatagttgccaggttgtttgcatgtttttagatctgttaaatctgttttttaactagactattcacctgattttttttttttttttttttttttttgagacggagtctgtctgtcccaggctggagtgcagtggtgtgatctcagctcactgcaacctctgcctcctgcgttcaagcgattctcctgactcagcctcccaagtagctggaattacaggcgtgtgccaccacgcccggctaattgtatttttagtagagacagggtttcaccgtgttggccaggctggtctcgaactcctgacctcgtgatctgccggccttggcctcccaaagtactgcgtgaaccaccatgccccgccattcacctgaatttttaaaaataaaattttggcctttgaagatttcaggagcattatcttgtaaaatgctgccgttctcatgcaatgatgttttcctgtgattttatttgatttacctatgtcctgtatttcttgtaaagtggatgttggggttacagtggtactgtctaatacaaatataatgcaaggcacagatgtaatttttaaaaattttagtagccaaattagaaaatgttaaatgtatgtgtgatatcatttttaatatattaaaaatgcagcatatccagttatcaatataagtttttgaaattagtgactaatgtagtcagtttaaaactgagacatttcacacttcttttgtactaagtctttggaatcctgcacgtattttacacttacagctaattttcattggaaattcttgatctgtatttagagtttataaaattaactattgaaaaagtagattaacaaacccaggttgttccaaacatacttaaaagtttttcaataacaattttatttttaaagttgaattaaaagtaaataaaattaagaattcatttcctcagttgcactagccacatggggctagtggctgttgagttagactggccagatccaaggcttccattttctaggtaatgtactgggcttcatattatatcctatcagtagtcacatactacaagtttgttagtgatactacgcatttggtcaaggtactcatctctgtatagtcatgtttttcttatagtaatctataagtgatactttggctacaggggaatattctgttccccaacagcctttcacccagtggtttttttggttttgttttgttttgtttttttttgtttttgtttttgttttgacggagtctcactctgccgcccaggctggagtacagtggcgtgatcttggctcactgcaacctccgcctccccggttcaagtgattctcctgtctcagccttctgggtagctgggattagagatgtgggtcaccacgcctggctaatttttgtaattttagtagagaaggggtttcacccatgttggtcaggctggtctcgaactcttgacctcaggtgatcctcccgcctcggcctcccaaagtgctggaattacaggcatgagctaccgcgcctggcctcacccagtggcttttaacatcactcagtcatcttctcctgaacctgtttttacattgagaggttaacagttttttttcctagttctgttgttctttctccattctttagctgacagtcttaggtgaagaggagctttctttcaccactttcactgccctctatactttttttcttttttggaatgtcacaacttattctaatttttttttcttttcattcactgtattataatcaattcctgtcattcgtattgatgctcaaactgtcccaattttgaccaatggtaatttttaaatttggctctgtgtcttgtgacacaactctactaatctgagtgcaaaatcagaccccagttcactttgtattttcctcttacagacctggaatcaatgattgctccaaaaagtcatgttccttttagacactaaggtctgtgtgataggcccacagtggacatctatggccttacagtggacatctagaatatgtattttcttacatcatacatttatactcatattcctattacaaacttaagaggttttttgtttttccttatgtttgtatctcttatctcttataataaagaccttgactcctaatgacactgatatattatttgttgtagcaacattaccagatgactagtattactaccattactttatttagtattgagtttctttatatttctttttgtccttactaaggatataaagttcaaacatttgcttgaactcagtttttttctctgtgtggttatgttatgaatttgacatactattaggcttgtttgtcttttttttttttttttttttttttgagacggagtttttgctcttgtccaggctgtagtgcagtggcgcaatctcggctcactgcaacctccacctcccgggttcaagtgattctcctgcttcagcctcctgagtagctgggattacaggctcctgccaccacacctcactaatttctgtattttagtagagacgagctttcatcatgttggctaggctggtctcaactcctgacctcaggtggtctcaactcctgacctcaggtgatccacctgcctcagcctcctaaagtgctgggattacaggcatgagccactgcgcctggcctaaatgcatcagcattttgatagtctcagcgcaaagtagggctgtataaaggggtcatcatccgtatctgggtgcaaacaacacggtgtcgcatttccttggaaaacagtaaatttgagtagatgtggaatgttgtgtcagaagtcttttctttgaaactcagcacctgggttgtaaatggatacttcttcttggtgtcaaaatattacataagccctccaggtgaaagtgggatatttcagtctttctgatatttcttactgatagaatttcaaacagcaaatttctaataactgattttagagaacaaagtttcacagtgtgtaaaaaagcaacaactcaaaaaagtcattagaactgctttgttctttttgtggtgactgtgcagctgtgtttttttgttttttgggctgggggtttgaagttttaaacttttctttattattcttgtgcttacccaatacagctgtttaaaaatcatagtttattattcctgtttcataaatggaatgaccttgagcatatgtggtgccatagtttttaatttcttttatatttatatacaatatgattgatttttgtagttagtctttgtttttcaaggtcactattttcttattactattttgtctgggtgatccagtcattgttgaaagtggagtgttgaagtcccctactgttatcatattgctttttcttctttcagatccattaatatttgctttatgtatgatgagctccctaaatatattggtgtatatgtacttaaaacttctatatccttttgataaattggtccatttattatataatgatctttgtctcttgtcacaatttttgtcttaaagtctattttgtgtgatgtaagaataggggctcctgctgtcctttggttatcatttgcatggaatatctttttctaacccttgacatttagtctgtgccccttaaaattaaaacgagtctcttgtagccaggagatagttggatcttgtttagtttgttttgagacagagtctcactctgttgcccaggctagaatgcagtggcgtgatcttggcctactgcaacctccacctcccgggttcaagcaattcttctgtctcagcctcctgagtagctggaactacaggcatgtgccaccatgcctggctaatttttgtatttttagtagaaacggggtttcaccatattggcaaggctggtctcgaactcctaaccttggcatctccctgtttcggcctcccaaagtgctgggattacaggtgtgagccaccgtgccccacctgtttgttttaaccatattcagccattctgtgtcttttcattggggaatttaatccatttaaagtaattgttgatagatgatgacttgttattaccatttacttcattgttttctggctgttttgtagtttttattcctgtcttctcttgcagtcttcctttgtgattgatgactttttgaatattccattctcctggtttgcaaggtttctgctgagaaatcaaagggtagtattatggagattcctttgtatgtagtaagtcatttttctcttgctgctttcaaaattctctgtctttgacttttgacaagttcactataatgtgtattagtttagatctctttcagttgaaccttgttgggggctttgagattcatgaatatgggtgcctctgtctccctagatgtggaaaatttatagctattctttatataggctttctactcatttctctctctgctccctctgtaacttctttaatgtttctgttcacttggcagagttccacaggttctttaggctttcttcactctttttcattgttttttctttttgttcctctgactgactataatctattttttattttgttgattcttctgtttgatgatgtctgctcttggacccctctagttaatattttagttcaattattgtactcttcaactccagtatttctcttttgttctttatcatttcaatctctgggttgaatttctcacttcattcatgtattattttcctgacctatagttatgtatctctgctgtcatttaactcactgatctttaagatgattgttatgacttccttctcaggttattcacaggtctccatttcttttgggttggctactgaatatttgttttctttgtgtcatagtttcttcttgattcttcatgctatttgtaggtttgctttgctgtctgtgcactgaagtagtaggtatttctctcagtctttatggcttagtcttgactgggaaagacgttcatccattagcagtgctccatatgagacaagatcaggactgacccctacagaagtataccataaggttgatgacaagcacaccttctcttctctctctctccacagaaaagcctctgtttgtgatttttctcagtcatacagagcagatgtaagaggatgtctgcctcatttctttctcagatgatcagcaccttagtatgaggcaagatggctactggccccttggagaaccctctgagaggtcaggaggtcaagtagccaatctcacttcttcccatgaagaaataatgtgccaccatgtccagctaattctttagttttctgtagagatggggtcttgctatgttgctcaggtgggatgcaagtgattctcttgccttggcctccccaagtgctgggattacaggtgtgagccactacgcctagcttcctttggaattatttttaacttcattttaattttaaggggcacagactaaattgtcaagggttagaaaaagatactccatgcaaatgataaccaaaggacagcaggagcccctattcttacatcacacaaaatagactttaagacaaaaattgtgacaagagacaaagggcattatataataataaagagaccaatttatcaaaaagatataaagtcagcacaactgagctgagctggttttgcagaagggctgatgagggtaagttgaaaattgttcttactggtataaatgcaactgttctcagtttgtgctcctctagggttgcttgcaattattagcttgattatggatttctcttcaaggtattttggttccagtattgttactatgtgtttccatgagtgaacagagaggtagggcttcctactctgccattttactgacattttttatgatatattacttattgaatcttaaaatacaaataaagtagttctgaattgctaattcagacccctgtggaaaacagatttattaactgagttatttttgtgtcattcttttatatttaggcttagattatatgttcaaaatactgttttccaaaatcacttagatgagttatttttatctttcaatatggttttgttattcatttgtaatacagttaaaaagcagtcgtttttgttaccttaaagtataatgttagctttggcgtttttgtagatgccctttattaggctgaaaatttttcttgggcttattgaacttcattaaaaacaatcatggttaatgaattttgtcaaattccttttctgcatctcatgagatcatctgattttctggcctgctaatatgttgcattaaattaatttacatttgaatatcaatctggcatttctgggatatgttctaacttgatgtattatcttttcatatatagaggtatacatatgtatgtgtgtgtgtatatatatatatatcactgtattcattttgctaaaattttattgagggtttgtgttaactctctgctctgcaaccagcctgtgatagctgagggcccagagtaccttaaatggatttatcttcacccctttgccctgccacttgccttggggggatggttgcctcggtcatcagggaggctacatgcacctcagtgatcctgccttatcccagcctttgatatactatggtctaatattaggtgaaggcttggtgaaagtctgtggatggattcatcactgtgaattctgtaactgagatgtctcagaattctaatgtggtcaatcagtccacactctgctgtcaaattttggtaagatttaattatgatttctttataccttcatgtgtggcagattctttctctcatcactcatccaagattgagaaaaatcatgggtatcttctttcttagcaaagcttattatttaggtgtatctgcattcttggctctctgaggtatttttaaaaggtatgattttgtagttatgtggcttgtgttttaagagagaaggatcaacccttggaagttctacattctaatatgaatgtatgagaaaatgtatcttggtttttgttttgttggatttttgagacaaggtcttactctgttgcccaggcaggagtacagtggtgagatcacggttcactgcagcattgacctccctaggctcaggtgttgctcccacctcagtcttctgaatagcttggagtataggtgagtgctaccatacctggtgaagatttgtattttttggtagagacagggtttcaccgtgtgttgcctaggctgggctcaagcaatctacctacctcagcatgccaaagtgctaggattacaggcatgagccgccatgcccagccagaaaattttaaaaatagatatttgtagagttatgcatccaggaggatttttagaaatgggacttctaagtcaaagggtaaatacatatataatttaactatatcctgccaaattccctagtgttttttcttttaatgaagttaaaaataattccaaaggaagctaggcgtagtggctcacacctgtaatcccagcacttggggaggccaaggcaggagaatcacttgcgtcccacctgagcaacatagcaagaccccatctctacagaaaactaaagaattagctggacatggtggcacatgcttcttctcctagctacttgggatgctgaggcaggaggattgcttgagcccaggaggtcagggctgcagtgagccaagattgtgcctactgcacctcatcctgggcaacagaacagggccctgtcccccacccccacccagaaacaagcctgagaataagaggagataattcctacgtatgtaactgacaaaaaaaaaaaggctaatatccaaaatacattaagaactcttacacgttaattccaaaaattcaaacaatccaatagaaaaattaagaggcttgagcaggctcttcgcaaaactgactgtactatggataataaacatgaaaaattgaagtttttatcctcatcaataatcaggcaaatggaaattaaatctgccactacacatatatcagaatggctaaatccaaaaagagttacgagatgttgaagagaatttagagaaactagagtttgtgtatacttttagtgtgtaaagtagaaatatgttttgaaaaacagtttggcattgtgttccaaatttgaatgtaaggatatacccttaaatgcgaccatataacatcattatttgaaatagcccagaattaagcaactcaaatgtctgtctacaagaatacatgaataaaccatgctatactggttaagtgtcagaaatacttgggaccagaagtcatttggatttcagatttcttcagattttggaatatttgcattatacttcagaaatttaaaatgtttcagtgagcatttcctttgagtgtcatatctgtgctcaaaaaggttttttggagcattttggatttcagattttcagattagagatattcaacctgtattatggagtgcttttcggtaaaaggaaaagaactatatgtgtaacagtatggatgactcataaacataatgttgaatcaaaaaagctagacataaatgaatagatgatttcatttataaagtttaaaaacagacaaaattaacctataccgttagaagtgagaatagtttccatttgcgaagaggggcaatgatttagatgtgtcatgtgtgcatcaaggtgtagaaattaatgatgcattatacctttgtaattctactcttttgtgaatatatatttcaattaaatgtttaaaaaattcagatgtcatttccaggtgtttgaaagagattagcaaaatgagtataaagaaaacataacactaaaagcaacatttaatgggaaaaaaagtaaaactgatgagtaaacccaagagataggttttttagaagtataaaattggctggtcatggccaggcggggtggctcatgcctgtaatcctagcactttgggaggctgaggccggcggatcacgaggtcaggaggtcgaaaccatcctggctagcatggtgaaaccccttctctactaaaaatacaaaacaaattagccaggcatggtggtgggcgcctgtagtcccagctactcgggaggctgaggcaagagaatggcgtgaacgcgggaggcggagcttgcagtgagccgagatcatgccactgcactccagcctgggtgacagagcgagactctgtctcaaaaaaaaaaaaaaaaaattagctggtcatggtggctcacaccggtaatccagcacgttgggaggtcaaggcgggaggatcgcttgagcccaggagttcaagatcagcctttccaacattgcgaggaaccccttctccattccagccccaccaccaatctctgccaaaaaaatttttaattggccgggtgtggtggtggcttttgcctgaagtcctagctactcagaaagctggggtaggaagattgcttgagcccaggagttcaaggctgctgtgagcttgatcctactattgcactccagccttgggaagagtgcagccctgtctcccccatacccccagaaaaatataaaatagacaaacttttgcacaatgtgtgattcagcatttcatccaccccatacattttcttttttcttctttttttgttgagacaaggtctggctctatcgcccagactggcatgcagtggcgtgatctcagctcactgcaacctttgcctcccaggctcaagccaccttcccacgtagctggcactacagacacgtaccaccacacctggctaatttttgtggtttttgtagagacggggttttaccatgttgcccaggctggtctcaaacttgtgagctcaagtgatctgcctgctttggcctcccagagtgctgggattacaggcatgagtcacaccccaaatattttctaccctctgctaggacctatgaatattaaaagaaaaacttcagataaacgtaatagttaagcattaaaggattcgtgaatcaggcagcactccaaaaccagaagggttcagggggctctgctgtagcagcatgcacagttggcttttgtagactgaatgtgaaagcaaagtaaagaaattacttaattggcttagccttagcagtattctgagtttctttagtgaaccattattattactctattgctttggataaaaagttgagtgtcaacttttttagggaagccagatgtcagttttcaagtgtcttatggttattttcttatattttcttgccagaaccagttctgagtctgtaaatatacatttatatgtgtgtgtgtggtaggggaggtggaggatgatattacttatccattcatctatttttttccatagtacttgtcaccaattgacataatacatatttatggctggacacagtggctcatgcttataatcctagcactttgggaggctgaggcaggcggatcacctgaggttgggagttcgagaccagcctgaccaacatagggaaaccctgtctctaccaaaaatacaaaattagctggggttggtggtgcatgcctgtaatcccagctactcgggaggctgaggcaggagaatggagtgaacctgggaggcagaccttgcttgcagtgagccaagatcgcgccactgcactccagcctgggcgacagagcgagactccatctcaaaaaaaaaacaaaaaaaaacttatgtgtttattatctgcttagccctttagaatgtgagatacttaaggtctaggacattttttgtatagttgactgctctatcctaagtgtctagtacattacctcacaaagataaggtccttcataaatgtttgcagagtgaatgaaagcgtaagccagagatgaggacttgaagggaagccacctggcctacatgatttttacagctggaggagctaaagatgtctaaattcaataagccatttgtgttgggggtcctcaagaccaccaccctcacgctcagtgatggaagcactcacaggactcagaagctattaaacctacagttatggtttattataataaaagggtacagattagaatctgcaaagggaaaagatgaatgaagtctagaagaaaccaggcttctctcccatgtagtcacatggacagtgcttaattctcctagtaaaagtgtgtagtattcctgcaaactgttgccaactagggaagctcacctgagctttggtgtccaggatttttactgagggttagtcccgtaggcatacagcacctgaatgacttcatacacttatgcccagcccctcaacagttcaaactcatgcattattgccagaagcctcaggcatacaaaaacaggccttcagcataaatcatattgttagcatacacaatctggtcacactagtatagtttggctcaatagctcaaccatagaaaaatatacacttaccagggaagatattccataagctaaaaggtcatctctcacaaactgagccaagtgtcagtcctgaagacagatctttctcaagagagtgcagggtttgggcaacccaggcctgttgagttaacctttccgtacatcatttcatgacgatctcatggtcacgttggagaataagaagaacctcaggagtttaggtttgtgagtcagagtaacctgtattcatatcctggctcacactttctaattggtgatgttgggttaattagtgtctgagcttaggtttcctcaactaatatgatagtaacaaaaactgctttgataattatatgaacttatcctaccactgtttctggcacatgggtactaggtaaacgggatttgttattatttatgtccacgtggcataatactctagtggcactcacatgaacaacttcatcttctgcagagagatggctaatgaatggcgcttgatgacagatgagtaatgcctgttgctgaaagattgacggtatgaggcaagactcccactactacttaatcaagaggaattgagattgacttacccataagttcagacagtgtctcgaagagactttgggaacaagatattcaggcacatttcactgttagactcacaggatgctggccattggtctttccctttgtggtaagtccgtattgatggtccttcaagacgctgctttaaccagtctgtgaacagcttgtcttgtgattagggtttagggtctaagtggccctgcttttgagatacctagaagaggctaaagtagatacgaatattctgtggtctaaatcctgggatttgggaaggaggagtaagtatgcaggcttttgtggaagaagttctgcttaatcacatgatcagtttcttttttggcaaataaggaaaatgttaacttctctggactttgtattccttataaaatgggattgttaaactctctctctcctggtcatcaaagcctgaagcatattttctggcttcaggtgagacaggctgctcaggcattttattataacgtgtgtgtgtccacttagcattagtatgaggtggcttcttgccttgtgagtatggaagctatcagcagcctggattctcagattttatttcttcttcttaagatcatctttctcaagatgttttctgtcttcatgagtcaaaatttgaagaggaaaggatggtggctgggtggttgacaaattactctcaggtaagtaggaaattgctttttctgtagaagcatatgcttcttcctaccatgtagatgtgttttctcctagtggaacagggcccctgcaagcaaagagggtctgcttagggaccacatctctcatcaaacttcttcggaccacagggcctctcacatggttgacaggtttcacagggaaatgattgtactatcccactgtttactaattcagtctgactgtcatccatgctgatatgctttcattttgctgtgatagggagagaatgcacatgtgcttctcggaatttgtgctgtcactggagcatttatttgagtgtctataatgtattcagggttgtgctaaaacctgtcagtagagaacaataagaagaagtcacaatctagttgtgctgagatatattcagttaggtgaaagaggtgctcttcaagccatatgactagatgagatcaccggtgaatatgtacagacaggggagaagaaagtgaggaccatcaagtgataggagaccaaagagtcttgtcaaggcatgccaagacaaggtccctcattctccagtcaacatagtggagaacgtacttgcctgacgccagcatgtgtgtgatggtttaggactcagtgacctttgaggatgtggctgtggacttcacccaggaggagtggactttgctggatcaaactcagagaaacttatacagagatgtgatgctggagaactataagaatctagttgcagtaggtaaggctggtaccattcttttcatttagtttttttctggaacaaatgtgtcttaagtaactatgttctagactctgcttgttaatgggctgcattggtaaacaggcgaaacattgtttccatctcatagaccttactgccttgtgatttttctgatgaaattgaagatctgttcattgttctagctttattttctccatggataaaagacttagagcttcttgaatatgtgtatgagcttaagcctgggtttcatgggaaggattgctagtccttttggtgaacagtgaatgagaaaagagtatttgaagtttaggttcacttgaaagtttttgtcatgaacattgtgttgtaatttaagttatatctgagagggttcagaatgcccagacagcaaaatcttagctcttaacatggaagcatttgttatcccttgcacattctttactttttttttttttttttttgagacagagtcttgctctgtcacccaggctggagtgcagtggcgtgatcttggctcactgcaagctccgcctcccgggttcacaccagtctcctgcctcagcctcccgagtagctgggactacaggcgcccaccaccacgcctggctatttttttttttttttttttttttttgtatttttagtaggaacagggtttcactgtgttagccaggatggtctcgatctcttgaccttgtgatccgcccacctcggcctcccaaagtgctcggattacggcatgagccactgtgcccagccatcccttgcacattctaacatcattcatctttccctgagaccagggtactagctatgcaaacatagtttgacttttcaggtgaaacaagaagagttaaagacagcgcagaaaattctccaagatgagagaaaagacagatgtgattatttgtgagaaacagccctgatctatgagaggtgcagtctgtttataaatattaagtaggaaggttttgaaagtgtacttttttggggagaatatcaaggccaattggtttccaaggttccttgggtaccttaacttctctttcactttatccatcttggaaactttcttttgctctgacattaagatctgtctcacttctcctttaaatttatgatttgcatttagctctgtatccatttcctttcaactttgtttccctggctgtacctcttttttgttcactataaagtctcaatgtttagagaaccatttcttttttttctctctctgtctctaaaaaaaaaaaaaaaaaaaaaaaagagtcttgctctatcgccaggctgaaatgcagtggcgcgatctcagctcactgcaacctctgccttccgggttcaagtgattcccctgcctcagcctcctgagtagctgggactacaggtgcatgccaccttgcctggctaattttttttttttttttgtattttagtaaagatggggtttcaccatattggccaggactcaatctcctgaccttgtgatccacctgtcttggcctcccaaagtgctgggattacaggtgtgagccaccacacccagcctagagaaccgtttcttagtgaatcacctaccaacttgacctcagtaccttactgttgctagactcttactacatccaaatttctcaatttatgtttcccgttctttaaaaaaacaaactatatttcaagccagtgtttgaaactacagtacatactagtcttgcatttttaacaccctttttaaaatcattatttctctaagaacttaaaatttttttcatcttatttcagattgggagagtcatattaataccaaatggtcagcacctcagcagaattttttgcaggggaaaacatccagtgtggtggaaatggtaagattcagaaggtataatttattgtcttccatgttagaggaagattggaaattccttaaaatggaaaagcagcacaataaccttgagacatttgagactagtgtttttcacccaaaaataatctgtctcttggagagactatggatcatgagtttgacaaacactctaaacatccctcagaatatatttgtttacatatttccttcaacattcccatatgtatctcagatgtttttgataaataattcactcttgggccgttatcagctaagctctatttagaagccctctgaaagtaaagaatataacagaacttcctgcagtcactttgttccacttgaaaacactcaggtctgaaccatgccttgcaatgaaaatggcaggaacaaacagtttcaattatactaacttattttccatgtgtaacagaattcagagtaaaagggagaatctcaatgaaataaatttggaaaacttctatgaaccatcattaattttcaccaacaggagagaaaccattttggagaggaactgtttgactttaaccaatgtgaaaaagccttgagtgaacactcatgccttaagactcacaggagaacttactttagaaagaaaacctgtgagtgtaatcaatgtgaaaaagccttcagaaaaccctctatctttactttacacaagaaaactgatatcggagaggaacttcctaactgtaatcaatgtgaaacagccttcagccaacatctacatcttgtttgcaagaaaactagccaaaatctacatcttgtttgcaagaaaactcacactcaagagaaaccatataaatgcagtgactgtgaaaaaggcttaccttcctcctcacacctcagagaatgtgtaagaatttatggtggagagagaccatatactcataaggagtatgtcgaaaccttttctcattctacagccctttttgtacacatgcaaactcaagatggagaaaaattctatgaatgtaaagcatgtgggaaacccttcactgagtcgtcatatcttactcaacatttaagaactcatagtagagtgttacctatagaacataagaaatttggcaaagcctttgctttttccccagatcttgctaaacatataagacttagaactagaggaaaacactatgtttgtaatgaatgtggcaaagaatttacttgtttctcaaaactcaacattcacataagggttcacactggagaaaaaccgtatgagtgcaacaaatgtgggaaagccttcactgattcatcaggtcttataaaacacaggcgaactcacactggagaaaagccttatgaatgtaaggaatgtgggaaagcttttgctaactcttcacatcttactgtacatatgagaactcacactggtgagaagccttatcaatgtaaggaatgtggaaaagcctttattaattcctcttcctttaaaagtcacatgcagactcatcctggtgtaaaaccctatgactgtcaacagtgtgggaaagccttcattcgatcctcatttcttattcgacatttgagaagtcacagtgcagaaaggccttttgaatgtgaggaatgtgggaaagcctttagatactcctcgcaccttagtcaacataaaagaatacatacaggggagaggccatataaatgtcaaaagtgtgggcaagccttcagtatctcatcaggccttacagtacacatgagaactcacactggtgaacggccctttgaatgtcaggaatgtgggaaagcctttactcggtccacatatcttattcgacatctaagaagtcatagtgtggagaaaccatataaggaatgtgggcaaacctttagtaattcctcatgccttactgaatgtgtgtgaattggggctgatacttggaaagaatgtggtaaagccactacttcctcacacttactgaacatgtactcattcatagtggcaatgtacacagtcataaggaatgtgggaagccttccttggtgtctcagatcttaacaattccaatagaagagaagacatatgaatgtaaggaatgtgggaaaatcttggctccttccataggccttactattcatgtgtctgtgcatcctaggaaacaaactgaacgtaggaaacctgtcgatgcttacatcttactgagtctgtttgaactcatgctggagagaaatgctatgaatgtgaggaaggtggaaaagctttcattattttcctcgggccttactgagcttgtgagcacattggatataaatgcacgtcctctggctgtaaggaatgtgttgaaacctttcactctgccttataccttaatattcagctgtgatctcacaagtgtgaaaaatcttatgaatgtaaaatgtgtggagattcttctttgtttttagcttccactttgggaacatgtcaaagcacacattgagaagtcccatgagtgaaagagatgttggaaagcccttgaacttggtcgttaggaaacatccacactgaagaggaacctgactgtatggaaggtcaaaaaggctgtattaatttacatgcaaaaagtcacactagaggaatgccatatcagaatgcttttggtaaatatacatgttttaaagaggttatatatcattaataaaaatatctagctggtctgaagatcctgagttatctcaattgttcacggttacagatggaactctttattattgaggagttccactctttcccccatttgtcactactacacttccctagtctttaaaacaattttaggctgggtgcagtggctcattcctgtaatcccagcactttgaaaggccgaagcgagtggatcatttgaggtcaggagttcgagaccagcctggccaacgtggtgaaaccccatctctactaaaaatacaaaaattagccaggcatggtggtacgtgcctgtaatcccagctactcgagaggttgaggcagaattgcttgaacccgggaggcggaagctgcagtgagctcagatcacgccactgcactccagcctggatgatatggtaagaccatctcaaaaaaagaaaaaaaaattaaaatatcctcagagggttttttaatgaaaaacttagttatagggaattgaggaacatttaggggtacaaattttcacttattgcacacaagaaaattggtactggccaggcatgctggctcacaccttaattccagcaatttgggaggccaaggcagaaggatcacttgagcccaggagttcaagaccagcctgggcaatatagtgaaacctcatcttgacaaagaataaataagattaactgggtgtactggtttgtgcctatagtcccagctatttaggaggctggggcaagaggattgcttgagcctggtcagggaggcagaggttgcagtgagccctgatcgtgccactacactctagcctgggcaacaggatgagaccctgtctcaaaaaaaaaagaaaattgacgccagcaaagaaaaccaaataaattatttaagtttgcctttctatatgtctttaaagactaatgatattgaacatcactttcatatgcttatgagtctttggtgaagtgtacatttaatgatcttttttcactgttgctgagaatctttggtttgaattattgaggcaggttctttcagtaagtttgagatataattgccatgtaataaactgcacatgtttttagcatacactttaagtttggacacatacacatatgtgtacatacacaccatcaagataatgaacatacctatcaaaccagatggtttcctcatgcccttttataatttcttcttctcctcacccttccctgcctgtcactctcctgatccactgatttgctttctcttagaatagacgactttatattatgtacagtttttatataaatggaatcatatagtctggcatctttcaggataattttttcagatccatttatgttgtagggtccatttcactgctgaatagtattccattgcaaggcataccacaagctatttatccatgtgttatttctaccttttggctattgcaattaaaactgccttgaatacccatatgcagattattctttaaacatgtgcttctgtttctttaaatagttaagagtggaatgatcagatcatatgttagtgtacgtttaagtttttaagagactgctaaacctttctcaagtagttatgccatttgacatttccatgagcagtatataagagttgcaattcttctgcatccttgccaattattggtatggtcagtcttttttattttgaccattttaataggtgtgtagtagtatctcatggttttaatttgcatttccctagtgactaatgatgtcttacatggtttcacgtgcttactggccttctttaagcctttggggaagagtctgttcaaatcttttgcctgtttatattggctttattttttatttatttttatttttttttatatagagacagggttttactctgtctcccaggctgaagtgcgtggcacgatcatgtggttttgcaatatttattgaattttgagagtttaaaatttgtaatatatttaatattaaacctattagtgtatttgatattaatactttatatttaatataatgtacatttaaatatataataaaacatttcattttaacagaggtaacataaatacacttcccaatttatggagtttgacttagtattgtttttaatttacaatggtgcaaacatattatgcattcaatatgtttctcaatttatgatggggttacaaattgtcaacttatgatagtttcaacttacaataggtttgtcaggacatagccctgtcataagttgaggagtatctgtattacaatatatttaatatgttgtacttgtggtacaagtacatggtgcactttgagttaaaatctttatatggcacaaagattggatcaaaatttggggttttttttttctttgtatctcattgttctagcatcatttattgaaaagactatcctttctccacttaattgcctttgcttctttcttgaaatattggttgtctttatacgtgtgtctgcttctcaactgttctgttccatatagctacttatcttttattccaagactaccctctcttgacaacttcataacttttgaagtccgatagagtttagtcttccagctttttcttttcagagttgtctttactattttaggtcagaggttggcaaagttttttataaaagaccagattgtagagattttaagctttacatgctatatatagtttctgttgcatattattttttctattacagaccttttaaaatataaaaatagttctcacattccattcaacctatacagttataggctgtgagccacatttggtcttgatgtggctgtaccttgttgacttacagctgttacaggactttcgtatttccatataaagtttagaatcaggttgtcaatttctaccagcaccaccccacacccccaaagtaattcactaagattttgattatcattgtgttgaatctgcagaataattgatgtcttcacaatattgagcatttcaacccatgaacataatatatctctccacttatttaggatttataatttttttctcagtagtatttgtgtttttcggtgtttgggtcttcctaggcattttttctctgacactattgcaaatggtattttaaaaatttcaatttctctgctagttcactactactatagaggaacacagtttttttacatatattcatcttgtatgctgcacccttgttaatttgttctggaagatttatattaacattatacttagaatatattaacattataataagctacataattttatttttttattttttaaattaaaatagagattggggtctcactatgttgaccagtcttgaactcctggcttcaagcgatcctcccatcttggcctcccaaagtgttgggattacaggcgtgagccactgaacctggccacaattttattcttaaatgaaaatagatctttgatatcatcgccagattcatatttgttttttgttttcttgagatggagttttgctcttgctgcccaggctggagtgcagtggtgccatcttggctcactgcaacttccacctcccaggtttaagtgattctcctgcctcagcctcccgagtagctgggattacaggcacccgcctccacccccagctaatttttgtatttttagtagagacgaggtttcgccatgttggccaggctggtcttgaattcctgacctcaggtgatccacccacctcggcctcccagagtgttgggattacaggcatgagccatcacgcccagctaccaaattaatattcaaatatatgttgccattacagagtgataactaaggacactttgaggtataggcatagctgtggtaaaaacagctctctccagctttgcatctaagttgtaaaataattacattgatgcttttaaacctgccatgtataatttttcaatgtattagccatttaataactctgagacagctaacatttaaataaatccctgtttgggaatggtatttgaacaaataatattgtgaacatatttgccaatttatactatattaagattctaaataatacagctatttaatatatcttgataattagtatttgaaataaatatatttctctgagtagccttttggaaaaagtgcacagaatatagtttccagtcatatgctacttttctaacttgcacttatctaaacatttcatcaggagagagttcaatagtacccgaaccaaaagtccagtgaatctgacttacccagtccccaatttggtttgcatgtctgcttacaaccatcatttctctgcagattttccacttagtctatcaaaaatcaatggtgcagcagttttttggagtctctgacaacaaaactctgtaaatctgcttcttccagtgtgagtgtctcatctaacaatctgaggataggacaaactgttgccagggacaggggaggacttcttttgagatccttggtagttttcaatgaagtctttgatatggcttacccttcctacttggtgaccctgtcctgaaaagagctggaagacaggcttcgtagacatatatgtttcatttttcttgtcttcaactttaacacccacctctttatcaaaaattccctgtaattctgaaggtaattccccctttttgatggagttcagaaactgctgacttgcaccatttgaataacttctgaaataattgttgacggtgaatccatttttccataattttatgtttacgtctacctgtttcttttgttaagtgggagacaagcatttggaaccaaccttctgagcttcctcaaaaaggctatcaacaaactattcacaatttgtttattgattatcaccaagaccttgattgtcaggtcctgtttcacaaacccagtcttttatactttcgagattatctacgtctttcattctcttttgcgttactccgagcacagcctccaagcctaggcctcactcagctcaggagccaccagcactgtttggctgcgagctccgtttggctggagcccttcagacccggagcgcctcgcccgagaccacctccggtaccccggctgcgctgctgatatcccgccggcctctctgtctccaccaagtgccaagcgttcacccacgcctgctgcctgcaagacctgaggaacgcgcatgggctttttttttttaagacaagtttcactctgtatcccaggctagagtgcagtggcatgagcttggctcactgcaacctccgcctctcggggtcaagcgattcttgtgcctcaccttctggagtaactgggactacacgcgtgcaccaccacacccagctaaatttttctgtatttttagtagagccagggtttcgccatgttgcccaggctggtctagaactcctaggttcaagcgatccacctgcctcggcctcccaaagtggtgggattatagacgtgagccaccgcacccagcttctggcagctttttagtaggttctatcatattttctactaggacaattctgttgtctgcatataaaattttttacttcttcctttccaatctgtatgcgttttgtatttttcttgttacattaaccagaacctgcagtgtattgttaaatagaaattgagagactagacattcttgtcttgtttctggtcttgggagtaaatcattgaatcttttaccatttagtaactatctttttaatcttttttttgataacacctattgggtgggaaacagtatttgtagttttttatttttatttccctggtggctaaagatttttattattttttttttctgggcttagctcgcctgaaaactaaagatattgatcatcttttcatcagtttgttgactatgtatctgtcttctttgggagaatgtctatttagatcctttgccatttttaaattgagttcttttcattattgggtttcaagagccctataaattctaggtacaaataccatatcaaataaatcgtttacaagtattttctttcattctttgtgttgtcctttcactttcttgatgatatcctttcgagtgtaaaagttttaagtttatttttttcttatgcttttggtgtcaaatctgagaaaccattgcctaacccaaggtcgtgaagtcttttatattttcttctaggatttttatagttctagctcttaaagttagttctatgatccattttgaactaatatttgtgcatgctgtgaacagtgtatccagcttcattcttctgcatgtaacacccagttaccctagcatatgtgttgaaaagactgtttatcccattgaattgtcttggcactcttgtcaaaaatcagttaaccataaatgtaaaggcttatttatttgttttgagactgggtcctgctctgttaacccaggttggagtgctgtggtgtgatcttggctcactgcagccttgacctcccaggctcaagtgatcctcctccttgagcttcccaagtagctgggactacaggtatacaccaccacgcctggctaatttttgtatttcttgtagagacagggtttcattttgttgcccagactggtcttgaactcctgggctcaagcaatcctcctgcctctgtctcccaaagtgctgggattacagatgtgagccactgtgcccagcattaagatttatttctagactctcagttcacctccattgtacatgtctaacctgtttgtaaccacactgtcctgattactgtagctttagagtaatttttgaaattgggaagtgcgagcccttctgtgatcctttttgcaatgcacgggttaaggttacttttggaggtggtagaagggatacgaatgttttaatttttttttgcacgacagttggttgaaaacagtcttttctctattggattatttgtaccttttttgaaaatgaaattgatgacttatgtttaaatctatttctgggatctattccgtttcagctaatctatgtgtctgtccttttgctaatactacactttttttttttgagacagagtctcactgtatcacccagactggagtgcagtggtaccatctcagctcacggcagcttccacctcccaggttcaagcaattcttgtgcctcagcctcccgagtagctgggacttgtgcctgagcctcccaagtagctgagactataggtgcgtgccaccacagctggctaacttgtgtttgtagtagagacagggtttcaccatgttggccaggttggtttcaacctcttggcctcaagtgatccacccacctcagcctcccaaagtgctgggattacaggcgcgagccaccgcatctggcctgcggatactatacatttttgattatggtagctgtctagtaaatcttgaaagcaagtggtgcgagagttccaacattgaccttaattttcagaatcatttgggatggtccgtgttttttgttttttcacgtaaatttttttttttttttttttttttttttgagacggagtctcgctctgtcacccaggctggagtgcagtggtgcaatctcagctcactgcaagctctgcctcccgggtttacgccattctcctgcctcagcctcctgagtagctgggactacaggcgcctgccaccacgcccggctttttgtatttctttttttttgtatttttaatggagatggggttttaccatgttagccaggatggtctcgatctcctgacctcatgatccacccaccttggcctcccagagtgctgggattacaggtgtgagccaccacacccggccttttcacataaattttagtgtaaacttactggtttccataaaaagcctgccgggatttttttttttttaactgagatttggtttaatctaaagatgaattagagaattggcgtcttaatactggctgttctgaaccatagacacagtatatctctgccgtggtctgaatgtttgcatacccgcaaaatttatatggttgaaatcctaatccccagtccaatgatattggcaggcgaggccttttggagatgattaggctaatgagggcagagcactaatgaattagattggtgcctttataaaagagattccagagagcttgctcatctcttctgccttgtgaggacacagcaagaagtcaccatctgtgaaccaagaagtgggacctcatcagatgccaaatctgccaacacttcaatcttggacttcccattctccagaactgtgagcaatacatatctgttgtttataagccatctagtctatggtattttgttctagcagcccaaacggactaagacaatctccccattaatttaggtcttatttctttcaacagtgttttgtggttttctgtattgcaccatttcattgatggtattataaatgctagttttaaattttcaattttttagtgctagtatataaaattatttatatttatatataatttatatttgaccttgaatcctgcaaactttttatagttatctattcctgtaactttttggaatattctacataaacaaatcttatgctctgtattataaaggcagttttgctttctctctgatatctgtcccttttatttctttatattttcttaatgtactggctagggcctccagtagtgttgaatgagagtggtgagaacacacatccttgtcttattcccaaccttaggcagaaagcgttccgtcttctaccattaagtatgatgttagctgtgggtttctttgaagacagctttattaggttgacgaagttcccttccactgcttgttcactgagagattttatttcattttttattttttcagcatttatttatgcattttaatttttttcttttcttttcttttttttttttgaaacagggtctcactctgttgcccaggctggagtccagtgatgcaatcataactcactgcagcttctaactttgggctcaagtgatcttcccacctcagcctcccatctagctgggactacagtagttcactgagagattttattatgaaaaccttttatcatagaaccatttcttaagacctcagagacctttagtttggtgtttgatagagtcttatgaatagatatcgtatgtagaagttcaaataaggtgcgttttcattaaccaaaagagtatctcagcatcccttctgggcattgttcccctgcattctcacagacagtggtccaagatagagaagggcctaagagattttagccatgacttttgtctaatgacacaaatccaataaaattaatggagataaatgggaaaaggttttttattgcaaaaaaaaaaaaaaaagttggcaaaagcaaggtcaactttgtccaaacaaaatggaaagaagtagtacaaaatgtaaagagacctttgaacccccaaactgcagatagcaaacagatgaaataggcctataaaactactcagttgaaaatgtttactttttatgggaaagcaagtatgattcagagtacagaacttcagaagactcactcctgtggagctgcactggtgcttgagaaacagataacatgttcctgcctgaatttaagaattgctgtgggtcaggggctgctgtggaatcccatttctccccacccatgcctttttaataggaatgtctattttaactatcccattcctgtctcaaactctgtattggttttgtggggaacagataacttgtctctttagcttacaaatgttcaaatctagaggagcaggagtatattcaagaaaccaaacccaaggacttttttatgatttttatttatgttttattgttatttttaaatttttatttttatttatttatattttgagacagagtctcactctggcacccaggctagagtgcagtggcacagtgatcttggctcactgcaatctctgcctgccaggctcaagcgatcctctgcctcagccttctgagtagctgggactataggcacatgccaccatgcccagctatttgtttttttttttttttttttggtagagacagggtttcatcatttttcccaggctggtctcaaactcctgggctcaagctgtcttcctgtcttggcctcccaaagtgctgggattacaggtatgagccactgtgcccagccacttttcaaaacattttttgagacagggtctcattccatcacccaggctgaagttcagtgatgcagtcatagctcactgcatccttgaattcctgggctcaagtgatcctcctgcctcagcctactgagtagctgagactacaggcacatgccaccacacccggcatgtgtttgtggggggtaagaggggtcttttttgctgttcttgccagggttggagtgcagtggcacaatcatagctcactgcagccttgacctcctgggcccaggtgatcctcctgcctcagcctcttgagtagctgggaccagaggcatgtgccaccacgcctgactaatttttgtatttttttgtagagagagggtctctctctgttgaccaggctggtcttgaactgctggactcaagggatcctgccacctcagcctcccagagtgctgggattacagacgtgagccactgctcttggccgtcttttctggattgcaccttatttggatgaccagatcctggacataaaaccagagtctactaccacgggcatgagactttggtgtggccttaggaagtggtgagagtttcttgtacatgggaagtataaatattaataatttgtagccacatgcagactccgatggttttaaaacacggccctaaaattctttgatacttttacctcccccttgtatctgcactgacctttgactgcatttcccaaaggagtacaacataaatgattccatgagatttccaaagcaaggccacgaagggccatgcggttcccttctggctggaacattccctcttgagatgcttcctcctctcagagtgcttcctcttgggaactagcagctatgctgtaacagggaggggttacatgtagatgctgccatcaacagccaccagctgctgtctgttttttagccatttcagggaaaacatcagatacaagagtgataatagaatccagatgattccagcccccagcctttggattcagcatcagctgtgtaagacttcccagctaggccctggacattgtgaggcagagaaaagccattcattcctcctgtatcctgtccaaattcctgccccatgatctgttaacataatagagtagtagtggttctgtaccagcagttctcaaccttttttatcttgagactcttttatactccaaaaattgagcaccccaaaaagcttttgccaatgggcattctatctgtgaatatttaacattttagaaattaaggcaggccaagcatggtggctcttgcctgtaatcccagcactttgggaggctgaggccggcggctcaactgaagtcaggagtttgagaccagcctggccaacatggtgaaaccctgtctctactaaaaatacaaaaaaactagccagcatggtggtgtgtgcctgtaattccagctactcaggagtctgaggcaagagaactgattgaacccagggggcagaggttgaagtgagctgagatcatgccactgtgctccagcctccagcctgggtgacagagcaggacttcatctcaaaacaaaaggaattggggcaaattttaaaaatattttagtaatatacataacatgctttttaaaaataacttttccacaatggcaacaaaataatgtggaaagagcgacatattgcatgcttttgcaaatctctttaatgtcttaagagcttaatagatgacagctgaattctcatacttgtttctacattttttgccattagttgctttgattagaaagtttggctttgctgagatacgtagttggaaaagagagaagcattttcaggtaattttggattttctttgatattacaccaaaactcaagaaatggtagtttctgaaagattagttgcaatatggaatgaaatcctgttaaggaattgtttctattctgttacattaaaattcatttgtttgtcttgcactatttttttcttttccttttatttatttatttatttatttttgagacagagtctcgctctgtcgcccaggctggaatgcagtggcgcaatctcggctcactgcaagctctgcctcccaggttcacaccattctcctgcctcagtctcccgagtagctggggctacaggctcccgccaccgcgcccggctaattttttgtatttttaatagagacggggtttcactgtgttagccaagatggtctcaatctcctgacctcgtgatccacctgcctcggcctccgaaagtgttgggattacaggcgtgaggcactgcgcccggcctttttttttttttttttttttgagatggaattttgctcttgttgcccaggctggggtgcaatggtgcgatctccactcactgcagcctccgcctcctgggttcaagcaattctccagcctcagcctcctgagtagctgggattacaggcacccaccaccacacctggtgaatttttgtatttttagtagaaacggtttcaccatgttggccaggctgctcttgaactcctgacctcaatctacccgctttggcttcccaaagttctgggattacaggcatgagccatggcgtccagcccatatcttgcactttgattggctattttatcaatgcatgattttataccttaatacctgacttagaaaatagggctggcacagtggctcttgcctgtaatctcagcacttcgggaggccaaagtaggagaatccttgagtccaagagttcgaaagcagcctgggcaacatagtgagaccctcatttctaaaatgaaaggaaatagtcatttacttcattatgcagatctttcaaatgtttacccattttaaagtacagtgtctaaaataaaccttcatgaacatgaccattgatcctatcagaaaagtttttatgcgttgagacgcttctaaggtgacagatctaagctttccaacttttgctgttccttcaaggacatttttatttagcctgagtgtggggcagtgaggcattcagtgactgcgcagttcagtgccactgccttaattttttttttttttttttttttttgcgatgctgttttgctctttttagccacaggctggagtgcaatggtgtgattcggctcactgtaacctccgcctcccgggttcaagcgattctcctgccccagcatcctaagtagctgagattacaggcgcatgccacaatgcccggctaattttgtacttttagtagagacgggtttcaccatgtttattaccaggctggtctctaactccttacctcaggtgatccacccaccttggccttccaaagtgctgggattacaggcatgagccaccgtgcccagcccactgccttaatttctgctgaggcaccagcgcttttggccacttttataatgtgtcatcagtataaatgtggatatggtgaaaaggtcaagaatgtatttgtgctattataacaatagttttttttttttgtttttttgtttttttgagacagagtgtcgctctgtcacccagggcgtgatctcggctaactgcaagctccgcctcctgtgttcacgccattctcctgcctcagcctcctgagtagctgggactacaggcacccgccaccacgcccagataattttttgtatttttagtagagacggcgtttcactgtgttagccaggatggtctccatctcctgacctcgtgatccgcccgtctcggcctcccaaagtgctgggattacaggcgtgagccaccgcgcccagccataacaatagttttaatctcacagaccgcctgaaagtgttttgggtccctcagcagtttaccaaccctgagaactgctattctgtatcacttaagtttgaagtggtttttttacacaacaataataatcagaaccgaactcatatcccttttttcttcttctttttgattattagtttcttcagtgtactagatggctgactgggaagattccagggtcccaacaggcttcagagttgcgaaggctctagaggtactgtttgctcacatagagcctaggtgttgagggcttagactctggagcccagctgctggaatgtgggccctgcagctgttactgttgagctgtgtgtctggagcccttcccttagcctttcctgagtctcattctccgttggttaaatgatgtcattaataaggcaaatgattttgttgctaaatgccagtggaaactttctaatagtcataactgtcacaaggtctgatgacctcacagttattttgcccttaacggatgccataaaatgcccgaaaagctttcccggggtcaactcacttcattacaactccctgagggagtaccattgttaatgtcttatgtggtctgtgtactatgaaatatccaccaccatctctgatggattccagcgcaccttgtttcacttgagtctgtccagtctttagagttaacagaggaaccctagttactgattccagactttgacctcatccaaaattaacagcagccaatttgcattcttctgggttatatattgttggccaaatattcagaattattgtgtgcctctgggcagagaactcacagttcaaaatatcttttttgttttcctttggtacagggtcttgctctgtcacccaggctggagtgcagtagtatgatcatagcttactgcagcctccacctcctgggttcaagtgatcctcccacctcggcctcccaggagctgggactacaggcacaaatcaccatgcccaaatatatatatatttttcaatctcctatttctttcctctctcttgttttggaagttactcagcaagctacatctgtctaattggatatgtatgtccatatcctgttagaatcaagtatttcagagtataagcatgatagtaataaagctcgcaatattatcattaagccacttactttagagatcccatgatgaacccaaagtctcccctattgcggaccctggagaccggttaagtctaggagaaataatatcaagatttagactgatctttttttccccaatctctttgcctctgagtaaccattcttcaaattcagaaccacactcagggtaaaatataagtaagggctatttatttttttgccactgttttggcatctgtagacaatacagtttatttaatttcaggttttcacagttatgtacagtcatacctcggagatatgtgagttcgcttccacagaccatcatagtaaagtgagtcatacaaattttttggtttcctagtgcatataaaagttacgttggctgggtgaggtggctgtcacctgtaatcccagtgctttgagaagctgaggtaggaggatcacttgagtctaggagtttgagaccagcctgggcaactatagcaagaccccatctctacaaaaaaaatgttttacatcagtcaggtgtggtggagtagctgtagttctagctattcaggaggctgaggcaggtggattgcttgagcccaggagttcaaggctgcaataagctatgattgtgccactgcattccagcctgggtgacagagtaataccctgtctcaaaaaaaaaaaaaaaaaaaaaaaaaaatgctgagcgtggtggttcatgcctataatcccagcactttgggaggccgaggtgggtggtggatcacctgaggtcaagagttcaagaccagcctgtccaacatggtgaaaccccattctctactaaaaatgtaaaaattagccaggtgtggtggagcacacctacaatcccagctacttgggaggctgaggcaggagaatcacttgaacgcaggaggtggaggctgcagtgagttgagattgtgccatggcactccagcctaggcaacagagcaatactgcatcttaaaaaaaaaaaaaaaattatagtctattgtgtgcagtagcattatgtctaaaaaacaaaggatgcaccttaattgtaaaatactttgcttaaaaattctgacagagaaacaaagtgagtatgtgttattggaaaaatggtgctagtagacttcatcagtggccacaaaccttcaatttgtaataaccttcaatttgtaataaaaataaaaccccacacgttatctgcaaagcacaataaaatgaagtatgttacatgttgattttcaggaattagaagaaaatgagagtattgttgtcatcggaaataagaggattgttttgccaagctactgaaaaaaaaaaaaactttcattcctttgtcaactgcaagaatggtaatatttgacaagaaaaacccaacttgtcaaatactacgattcttgcagttgacaaaggaatgaaaagttaatagcatatgtgaggctggacacggtggctcacacctgtaatcccaacactttgggaggccaagacgggtggatcacctgaggtcaggagttcgaggccaacctgaccaatgtggcaaaagcccatctctactaaaaatacaaaaattagccaggcatggtggcaggcacctataatcccagctactggggaggctgagacatgagaacaggttgaacccgggaggcggaggttgcagtgagctgagattgcgccactgcattccagcctgggcaacagagggtgactccgtctcagaaaaaaaaaaaaagtatatatgagcatttaacaaggctataggttttgattttgagccctgaaaacccccaggtttagtttcattgggaatttgtattcaaacatgtctctgctctggatccataggtggcacaattttgccagtttttgatgcataaatggtgacagtatcctttaacaaaattcctaaagtagtcttttaaaaaaataattctgaaaatctggccaatgataatacaggactcggaagaaaatactacccattgaaattggaaagcctgttttcaatttggggtctgctttttttttttttaattgctttaagagattaaggattttagacacaaacacgtcataaagtgtttttagatttgcatgaacctactgtggtttagtataaataaacccctaacatgagtgttacagatgcctgtgagggtatcttgggggtttctacactgcctaccccaaacctgactgcagtcagagccaacagggccccacgtaggcaaaggctatgtcattaattctcaaatgagattcgtccaagcgggaaatgcacatctagtgcagtagttttaggccagcctttttcagagcctcaggctctgcctgtcaccttgaagacatccatgtgggtcccctcagggcttctctttgccataaaaataaaatgattgctcccaccaatgtttgcgtccatgggagaggaggtaggagcagcagtacttgtcctgtgtgtgggagacacttgaagggctcagtgggaattgtcagcagcagggaacagaacaggtggtgagaagagtcattccactgagtttctgggcctttgactccctgaaacttccttctcctctatccaacctccctctccagaaaaaaaaaaaaataatttaaaaatggaatcagtgtaatcagtgaagtagctgtattccagtgaacaagcagcctgcccttgcatctgcatgcatgcagccttggcgttttctctagaaaaaagagaggttctacctcgtgcatgaatacaggtggaggccaagaccagcattaacaaaggctgtgtgtttgccatggagctcaggagggctaacagtcattttacttctgcctccgaccatcacactttgtccccagaacaaagccaagagtccttggtcaatgaaagtgtgtaaatatcctcacacttcccctagtagttcctttttaggctgtaatcatgtgctaaagaaaagaacctaacttcttaaaatctttccctttttggatgtagattgaaatttttgttttaaacacaatggccctaatgtctaaatctaatgttagtaattaatccctagtgctttaaggatcttctgtttataggcagttattttatggagctggtctctgtgagaggcacagactgccaggaggggttgagatttcctttaaccaggattcttagttctgaatggctctagtgaataacattaacaatgattctctggccgggcactcacgccggtaatcccagcactttgggaggcctagacgggtggatcacttgaggtcaggagttcaagaccagcctggccaacatggtgaaaccccgtctctactaaaaatacaaaaattagccgggcatggtggcagccgcctgtaatcccagctacttggtaggctgaggcaggagaattgcttgaacctgggaggcggaggttgcactgagcccacagtgcgccactgcactacagtctggatgacaagcaaagctcaatctcaaaacaataatttttaaagtaatgattatcttaaccattcttaaatccttctgtctagtaggaatcttattcatgggagtgtctggaaaagggacaaagagcggctattgagatttttttaaagcctggatttgggatgtctgaacagtgaataactccaaagccatttaaaaatcatctttttttctaccaccggactgagcttttcagttttaattccaaggttccaatcatatagatgtgagtcaaaccctgttgggccaaacaggatctcctttgttggcggataatttcaagtgctcacagagaccctccgtttttttttaaatacctggacttaattgtttaaactggagtccggaccaaaacatctctgacctcgggggtcttcctttggtcaggaagaggggagggagcaattggacccctttccctctgcggctgcagagtccaattttcctctggggacatttgctttttcccttggggaagacagtacggattctagttctgtggactcttttacttagctttgagacccaagcaagttaattggcttgtgcctcttattttactctaatgcaatgaataaagacagtcccagccttcgccctaagggagcaggagcacctgcgatgccccgttcccaagtcctcagggcgaatccgccaaatgtgcgagctgggcagcccacccctttcagctgctggccggaagcggaagtgggcgtccgtcgcctcgccatctcccatagctgtcgcctgcagctgagaaagggttgctgtcccagcaggccaggtccaggtgcgccccactagtgaggccggcggaatcgggagggaaggggtcaagggcacagtgcgcagccccggctgctccagaccttgcctgcagcttcccgccccagcctccggctatcgcggcgtttcttctcagaggccgccggctttggttcctcccggcactgctgggcttggggctgccattccgggcattggttcccgggaggaggcaagtgggttcatgtggtcagagtgcgtcggcggggccttttctccactttctgtacccttctctttaaacgtcgtccccagtaggagactattttttctcaagaaaatgctctcttggacctcactttccgttgttagaaggcatatcttgggatgcgcgttattggtttgtggagatcgtccctttttttcccctctgttatgtggatgcaccctagtgcctgatacacatttgagttcctatctgagtgggcttgtgcatgttttttcgtatttgtggacttaggtcttcaaggtttatttttgaaagtcaagttgttgggtcaaagcataaatgaatgtgtaattcctaggtatgaccagatccccctctatgggacttgtgcttttttgagccctcagggtgtgttttgtatgcagcaagcagcagaccttagttttcagtttacctgtagtttcttttggatgtttacatattgacatatcgtttatgaataagaactttattctccctttataatcctattacgacccactcctgccctacaaatttactgccctgcctacgacctccgaaacattagaaggagcaatccttgctgccttccaggtctcagaaagaaagctttcagcttgtcactacttacatgtttgctatgtgtttttgatagattaaagacattcccttctgtaacagctttattgacataaaatcatatatttcatctcatttaaagtgtataaatcagtggtttttagtatattgagttgtgcaaccatgactacaatctaactctagaacattttcattgccccaaaagagaatcccatactcatcagcagttactcccccatggttggcaagtttttgggctctattcttgagtttttttatgttgtcatacaccaggtcagattgatttaggtaaaaacaacactcttcatttaagaatatacagatgttctccttttccagcagtaagtcaaggcctcggcggttttggaggacaactgcagctagagtcaacttgggcctggaggactgatgaagtttgtgatatgactgtgatgctagcagagaattcattagagagactatggaaggtcctgacagaggttgaaatgcctgctattccagtaccgagagcaatagtggaggcagaaagtcttaaactgacaagggaattagtggaataactctttttgtcgtgtcggtgtcatgaggggaacagggagctcttcagtcctatttgcaaattgcattttgagagtaaggaaaactagtgtgcatgtgcctgtccaattagcaggtagacacatgtaggtagaggatccacagaggaaaaagagaccttgtgcgaggcaaaactggagatgcaaagtaaaaagatgaggagtgctgaaaggggtgtcttgtacttagaatcctagggatccagctagggcggcagtcgtcagaggttgtaatggggactgatgaggtaattgcgtcgagggggaggttcgattttcatggtgtatgagaaaacgtcgagtatctacaagcaacctttcactgttattttcagggctgggtataagtaagcaagaagagggcctgggagaagagtctgacgagcaaggggaaggtagccaaggatggagtgaaatacagggtaagtgtcttcctaagcaataattactgctaatgtttttaagtttgccactactgatagagggcttgtctgtaatatggagctggaaggctccaattgtttcagtgatgtgtgtagttgggctttggagatgaagagtaaaggaacatcgagaaggtgaaagtttacctaggggaattccagtgggtctttgctgagagatacataaaggagctgccacaggaatagtagtttgtgttgtgagaggtctaaatatggggggagtagagttgatataaggaggaaggttttaggtctttaagaacacaggctaagggagaagggggaatggagggcagaagcttgcccatagtgaaggaggcaagcccagaaaaaagagagagtagagacatggagagaaggggtgggggcttcttgtcctccagaaaagcagagaaggggtagagacacagagagaagggaccggggggttcttgcaccccagaaaagtggagaagggctagagatatggagagaagggttcaggggttcttgacccccagaaaagcggagaagggtagacacatggagagaagggggtcagggggttcttgcccccagaaaagcagtacttgccgctaagggtgaaggaccaaggcaggcatccccacgtggtcagacacctctgaaatgtgggtgaataatcaggcaggcgtccccgcatgattaaacaccaagggaagactgtcttcccgagtccatgaccggcgccggagttttgggtccatggataaaacacgtctcctgtctacgagaaaaggaaaggaactgaaattgagagaagggagagattgaagtgtggcgccaagattgaaatgagaaagaggttgagggatagtaagagaggttggagaagagagtaaaaagaggccacttacctgatttaaaattggattgatgttccttggctggtcggtctgaggacctgaggtcataggtggatctttctcacagagcaaagagcaggaggataggggattgatctcccaagggaggtccccagatctgagtcacagcaccaaatctacctctgtcgccaggctagagtgcagtggcgcaatctcggctcactgcaacctctgcctcccgggttcaagtgattctcctgcctcagcctcccaagtagctaggattacaggcatgctccaccacacccggctaatttttgtatttttagtagagacgttctttcaccatgttggccagagtggtctggatctcctgacctcgtgatgcgcccaccttggcttcccaaagtgctgggactacaggcgtgagccaccgtgcctagcctcattcctttttttaatgagacaaggtctttctctgtcacccaggctggagtgccgtggtgccctcgacctccctagctcggccttccaccttagcctcccgagtaggtaggaccacaggtgtgggccaccaagcctggctatttttttaaatttttggtagagatgagatctcactgtgttaccaggctggtctgaactcctgggttaatgtgatccacccactacagcctccctaagtgctgaggattacaggcatgagtcaccatgcctggccttcattttctattgtcaaatgatagtccattgtatggatataccacattttcatttatccgttcatcggtagatagacatttgggttgtttctcctttttggctaatatgaataatgctgctgtgaatatttctcttgggtatatacctaggagtggaatgccttgttcatgagacgaacttttatgtttaatcttctggtaaaatgctaggctgtttgccaacgtggcagcaccacttcccacttcactcccctccacaaaaaaacaagagaatttctccacatcctcatccacacttgtctttttaattacactcaccttaatgtgtgaagtggtatcttaatgtggttttgatttgcatttccctggtgtctaatgatgttcagcatcttttcatgtgcagttgacctttttatctttagaaaaatgtacattcagatcatttgcccatctttgaattgtgttttcaaaagtcagctgaggctgggcgtggtggctcacgcctgtaatcccagcactttgggaggcccaggcgggcggatcatgaggtcagcagatcaagaccatcctggctaacacggtgaaaccccgtctctactaaaaatacaaaaacatagctgggtgtggtggcacgcgtctgtagtcccagctacttgggaggctgaggcaggagaatcacctgaacctggcgaggttgcagtgagcagagatcgcaccactgcactccagcctgggaaacagaccaagagtgtctcaaaaaaaaaataaaaataaaaataaataagctggctgaattaaattcagcccgaaagttttcaggttgaaaaaatttatttttgaaatcattatgtgatactggtttttatcactttgagttgatcatacaatttttcttttgctctattaatgaagcaaattatattgattttctaatagcaagcatctcttgcattcctctggtaaacctaacttaattctgttgtactatatttcctatttattgacattttttgtttggacttattttccttagaatatctgaatctatgttgaaatttgcctataattttgtttacttaaagtggccttgtcatgtttgatatcagtatgccaatctcaaagaatattcttccttttatactcttaatcacggtaatccctttgataagttaaactgttttgtgaaattagtttaaaagtgaccatatttttttcccttgtaatattgtaaactgctgttaatagaataaccaaaggcaaacatgacattttgaaccatacacaattctggggtttgcataaaggctatattaaataaaaccttccagatacccagctcttgcctatagagtggataagttatctatacctgaaataatgcaaacattagtgacaaattacattgaagtgtagtttaagtaaccagtcttcataaatatgcctaatctctggaatattttcatccagactggaattctttcttctttgagtggcataactgactgataaagcctttgagcatggtgttttttggtgaaaacctaaataatctagttttgttttctgttttaaaagaatatctgggcagtgagttaagctgggaagacctagcaccttgctgacgggatcagtctagattcttcttttatattttttaaattgtggtaaaatacctaaagccaaatttgccattttaatcatttttaaatgtacaagtcagtggcattcattgcattcacagtgttactcaaccatcaccagctagttctttttattgtaatttctacacagttttggtaagttgtatttctgtaggaatcaatttatttcctgaaagttttgaatttgattaaagttattcatgtcttgttaatctctgcaacatttgtagttgtgtttttctccttttgtctttgaagaattttgcccgatttttttcctagtagttttcaaagaaccagtttgtagcttgagtgatactgttgttttctagttcatcatcgtattttctgctcttcccgttccagctgcttaagttaatttttaagttcacttcttttctaatataaacatataaagcttatttttttcctaaggaccagtttagctacattctacaagttgtggtacttagaactaatcaataaccatagtattatgtattttctaattcaattcttttataaaagcataagttatttggaagtgtgatgttttctgaattccaaatgtgttacttttttctgtttgcttgaaaaatatgaaaccactaatattcaaccatattttaaaactaccaaaacacccatttcatatagttcaatgtaatctcgttattaacttacaacttagttacattgtaattaagacatgtcagagaacatgtttgtataccaaatctttttctaagttttaatttttgtgggcacatagtaggtatatatatttaaggggcccatgagatgttttatataccaaatttggaaggtttaagactggctttacagtatattcaccatacagtatggtcagtttttataaacacttcatgtgtgcttcaagaatctatgtatactccatacattcagtagtgtccctcagtgtgctagattaagcatactcattgtgttgttcaaatcttcatatcctttttttcatatgatctttctattgctgagcagtgtttgaaagtcttatagtgatgatttgtgttatttatcctttaattgtgctagcttctgctttataagttttatgagactagaattttatatcttcctaattggtactttacatcctcatgtcattacctctaatagtgccttttgtctcaaaatctatgaaattaatttagcaaacaaactttattttggttaatattcacctggtatatctttcttatttttgagactcaatttttatgtgttgttgtggattttagtgcatctaatgaaataacatagagctagtttatcttaatctaccaggacagtctgtttttaaactgcagaatttagcccatctgtacacttactgttattgatacagtcagacattttttaccatcttacattttacattgtgcttttcatttgacctattttttttgtttcatttcccttatttttcttacctttggaattgagatttttttttaacctaattccattttctcttctagactgtgagttaaactcactatgtccatcctttgaattgttaccctagctattttatcatgcatacttacagtctaaacctaatcaatattgtgagtccccagtggaagaatacaaggaacatactactcaatcacctccttcccaatttatatattatttagtattaggattgagcttatttttccatgtcacgaatttggtattattaccattttatataataaaggtttgcttaattttatccattttacctttgttcattctacttaacattttgggtcttccagttcctatctcctgaagtacttttaagttacttctgtgatggtctttttggatgggtaagttgtctcaggtctttattttaaaatgcctttatttgactctccatttatttttcttaagcttttaatcatgaaaatttttaattctccacaaaagtagaatagtacagttgtctctcatatccatgggggactggttccaggacccccacatggcttccaaattccacagtcacaaattccttatataaaatagcattgtatttgcatagaacctacacacatcctcccatagatgctattttttccctcccatttactttaagtcatcactagattacttacagtacctagtacaataagtgttatgtaagtggttggtttgttttttttttgttttttttttaagagatggggtctcattctgttgctcaggctggagtacagtggtgtgatcatagctcactgcagcctgaaactcctggactcaagtaatcctcccacctcagcctccctagtagctgggaccacaggcatgcgccaccacgcctggataatttaaaatagatacatatttttgtagagacagggtgctgctttattgcccaggctagtctcaaactcctggcttcaaggcatcctcctgccccagctttccaaagtgctgggattactggtgtgagccactgtgccgggccataaatagttatgctgtattgtttaaggaataatgacaagggggaaggtctacatgttcagtacagacacaagcattcatcttttttccacatatttttgatctgtggtcgagtagccaacagatacagagggctgactgtataatgaattctcatgtccttaacacccagctttgacagttaccaatattttgcacatcttgcatcatctagcgctgagctgtccaatacagtagccactagcctcatgtggctattgaagtttaaatgctcatttcaagtattcagtagctatccgtacatgattagtggttactgtattagatactgcaaataaatattgaataatgctgggttttccccccagatttgtttttaaagcaaattccagacatcctgtcatttcatcagtatattactaactgtgcatctctagttggttcatcaccactactccattatcccacctaacaaagtctgacgttccctgattggctacagaatatctttttacatttggtttgttcaaatgagaatcttaacagggtcccaacattttttttttattttagaccccttaagtttctattgtgtctgttctcttcctcctcccttttcatttttttaatccactgatttattgaagaaataaagttatttgttcttaaaatgtcccacatcatatatggattttgctgactggtttgttttcattgcttaacctggttatctttgtatttcttataaagagtagttagatagtttgtctagcgttttaggttgataagttatttttttctcagcatactgaagacattgtcctgctttcttctgacgtccattgttgctgttgagatgtcagctatcagtctgtttttccttttataggtgacctgtgtttttcccctggctgctttggaaattatgggaaaaaatcaaataccaaggaagaaaaatctataatgaaattagatgtggatttctttttatgtattcagcttgggggcttatgatacttctagtacccaaaggttagtgtctttcactaattcaagaaaattgctaggttttcatctaatagtgcgatcaaagttctgatctggtagttaatactggcactgaatttctcatttcagtgagtttatttttcatttctaaaaattgttttttaaactaaccattttatagtatcttaatctatatccattcaaatttttattaagcttttatatattttaaaatatatctaaaagggtaatatccaaagtgttatgctttttaccacctgacacctgtgtgttagctatgtcttacacatggtacattgtgtatttgtgtttcacaatttcttaaactgtgccttcctcaatttacttagaactttgtatataagattttttctcaagacctgacttaaagttgattttccagagataggtcgatttgcttgcactagttgcttggggacaatgccacttaggaccctctttaagtgaaattattcccttgaggttgtttgaactacagaaatgaatttggactgaaatctaaaagagagcacttgtgtatacagatcctcaagagagatttgctttttattatacctgatgggtacagttccttgcttcacgctttcatatggaaattttactttctttttaaaaaactgttcactgtggattttcagtcatacctaggaatagagtgctataaagccactatgtacctaccacccagcttcaatgattgtcaccattttgccattcttattacatctgttctctcccttgcttcctttcatcattgagctttcttttccttttttttttttttttttttttttgagatggagtcttgctctgtctcccaggctgaggtgcagtggcatgacctcagctcactgcaacttctgcctcccaggttcaagcaattctcctgcctcccctcccgagtagctgggattacaggcacctgccaccacacctggctaatttttgtatttttaatagagaaagggtttcaccatgttgttcaggctggtcttgaacctcctgacctcaagcaatccacccaccttggcctcccaaagtgctgagatgacaggcgtgagccaccacaccctgccagttttgtttttctgaagcatggttttccagctttcttgaggtataattgacaaataataaaaattatatatgtttaaggtgtacaacataatgttttgatctacctgtccattctgaaatgatcatcacagtcaagctaattaacatatccatcccctcacttacttttgtaagatgcactctcttggaaaatttcaaatatacagtacatcattaactatagtcaccaagccatacatcaggtctccaaaactcagccatcttataacagcaaatacatacccattgaccaacatctccccatttcccttgccccttggtaatcacctttctaatgcttctaggagtttgacttttctagattccatgtaagtgaggtcatgcggtatttgtctatgtccgccttattttacttagcatgatgttctccaggtttccttcttttttaagactgaataacccactgtgtgtatatatatgacattttctttacgcattcagcaatcgacaaacacgttgtttccatatagcagctattataaataatgctgcaatgaatatgaggtcacagatacctctttaagatattgatttcacttcctttggttatatacccagtagcaggattgctagatcatatggtagttctatttttaatattttgaggcacctccactactgctttccataatggctgtaccaattttcacttctaacaacgatgtataagggttccctttctccacatccaacacttgttatcctttgactttttgataatatctattataacaagtgtgaggtagcagccaactatggttttgattggtacgtccctaataatgtgatgttgggcactttttcatatacctactggccatttttatttcttctttggaaaactgtctatttagatcctttacccattttttattccatttttttctatcgaactgtatgtatttcgtaaatattttaaatattgtgcagattctttctcccattccataaggttgctttttcattttgttcattatttcctttgctgtgcagaaactttttagtttgatgtagtttcacttatttttgcctttcttgcctgtgcttttggtgtcaactctttaaaaaaaaaatttgtcaaaattaatatcaaagagcttttcccctgttctagaagttttatgatctcaggtcttacatttaagtctttaatccattttgagttgatttttgtttgtagtttaaggatctaatttcactttttcacatgtggatatctagttttccttacaccatttgccgaagagactgtcctctccccattgcttattcttggcatctttgtccaagattagttgaccatacatgccagggtttatttctgggcttcctattctgttacatttgtctccgtttttatgccagtaccatactattttcattacagtacctttgtaatatatttgaaataaggaagtgtgatgcctccagtattgttcaagattgctttagctatttggagtttttgtgtttccatatgaattttaggattgttttttctatttctgtaaaaaatatcattggaatttcataggaattgcattaatttgtagatcacctttcatagtgtgacatttgacaatattgattcttccaatccatgaacactgggtggcttcccatttgtttgtgtcttctactttcaccagtgttttagaattttcagtgttgagatcatctccttggttaaatttattgtcagtattttactctttttgatattattataagtgaaattattttcatagttttttttagatagtttgttagaaatacatttaatttttgtatgttgatttttttttaccctgcattactgaatttacatgttagttttaacattttttcatggtgtctttagggttttctagatacaatatcatgtcatctacaaacataattttacttcttttccaacgtagacgccttttgttttcttgcgtaattgttctggctagaacttcagttgtatgttgaatagaagtggtgaggatgggcatctttgccttgttcccaatcttagaggaaaagctttcaattttttataattggctgtaagctgtggttttgtcacctatggcctttactggtgttgaagtactttccttctgtaactaattcgttgagggtttttatcacagaagaatgctgaattttaccaagtgctttttcttcatctattctaatgatgatatagtttttatccttcattctgttgatgtgatgtatcacattgattttgcgtatcttgaactatccttgaatttctgggataaatctcacttgatcatggtgtatggtccttttaaggtactgttgaatttggtttgctagtattttattgaggagttttgcatctattttcagtagggatattggcttgtagttttttgctcttacagtgtttgtctggctttggtatcagtgtaatgctgacctcataaaatgagtttaatgaggagtttggttgggctccttttccatttttttggaagagtttgagaaggattctttaaatgtttggtagaattcaacggtgaagccaccaagtcctgggcttttctttgatggaagatttttcctcactgatttaatctccttactcattattgatcttgtcaggttttctatttatgattcagtcttagcaggttatatatttctaggaatttattcatttcttctaggttatccaattttttggcatataatttttcattatggtctcatgatcctttatatttctgtggttatcagttgtaatgccttctctttcatttctagttttacttcagtcttgtctattttaatcttaagtagtctggctaaaggtttttgttggtttatcttttcatacaaccaacattcagtttcatcgatcttttctattgtcttcctagtctctcatttatttctgctgcgatctttattattatttccttccttgtactgactttgggcttagtttctttttccttctactgactttgggcttagctgctgctttttctagtaacttgaggtgtaacattaagctggtataagatctttcctactcacccttgctctctttggtttccatttacgtggaatgtcttttcccatctttttactttcgggctacatgcattcttaaagctatagtgagcttcttgtaggcagcatataccttaggtctttcttttttaatccagtcagccactatgtgttttgactagagaacttaatccatttacttttttgtttaaggagatagggtctctgtcacccaggctggagtgcagtggcatgatcatactcccactactctcagattcaagcaatcctcccaccctagcccaccaagtagctgggactactggcagatgccaccacacccaaataatttttttaaattgttttctgtagagatgcggtcttgctgtgttgcctaggctggtctcaaactcctgctctcaagtgatcctcctgcctcagcctcctgagtacatttatatttaaagtaattattgatgggtaagtacttactgttgcctttttgttcattcttctgtggctgttgtacagatgttttgttgctttcttcctcccttgtcttcctttgtgatttgatgactttctgtagtgatacgctttgatttctttctcttttctccataatataggttcttgctttgtggctactatgaagcttaaaacatcctgtagttttaatagtctgttttaagctgttaacagcttagctttgattgcatacaaacaatttatactcttccatttcccacattttatgtttttgatgtcacaatttacatctttctatattgtatattaacaaattattataactttttaatatttttatcttttaatcttttacactagagataagttatttagataccactgttacagtattagggtaatctggattgagtatataattacctttaccccagtgggttttataatttcatatggtttcatgttactaagtgtcctttcttttaagctgaagaatttactatttcctataaatcagctccattactgatgaagcccctcatcttttgtttgtccaaggaagtttttatctctccttcatttctgaaggccatttttggcaggtaaaacattcttggttggcagtacagtcatgcactgtgtaaagacattttggtcagtgatggtccacatatgtgacagtgctctcataacattttaatagtgctaaaaaattccaatcacctaatgacatagccagtgtaacattgtaaagcacattactcacatgtctgtcatttaaacctgctgcactgccagtcatgtaacagtagtaaatatggttatgtacagtagattatatacagtacataataatgaatagtaataagtgaccacattactggtttatatatttttatactatttattgttattttagaatgtattccttctacttactaaaaaagaaaagttaactcaaaaacaagcctcaagcagatgcttcagaagacattctagaagtcattgtcaccataggagatgtcagctccgtgcatgttattgcccctgaataccttaagtgggacacggtagaaggtgtcagacagtgatactcaagatcctaaccctatttaggcctagattaatgcgtatgtgtcttcgtttacaacaaaaaagtttaaaaagtaaaatcgggcaggcaaaaagggcctggaaggtaggctactgagttaagaagacagagtcctagctctgctataagatttgcagcactagattttgatacatatacagctaagtgtactaaatgttgttctggaatgtcacccttttattatgaaatgcaaatatgctcacctttatggtccttatgagttactccttattgttctaagtaatttcgggatattaactcagcccaaccctatgaaattggtcccattctaacaatgaggaacgtgagggtgtgatataagatattccaaactcatcttgaagatttcttagtctatactagactcagctatttctccagtgagtcctggtttctgtcacgggtaaatgatattcagagacagttttgcactttagaggctcattcctcctgagctgttagcagtcataagcctttttagtggttcaggctagaaaaaagtccaagaaaaaatgaaaaatgcatactatatttctaatttgaggatatactgtgttcttggataaggaggcaaattgtaactacactctatgtgtatgttgttaccctttagtaagaagaagcttcccagcctgctagtgttgaacatctagcaggcctagactctaatggcttctgtgttctcctctagctctgcctgcttaggactctgcccagccaggaaggaaacctacaggaggaagaatggctgcagggtggctgacaacctggtcacaggtacacaagaaatttctctatttccaaaagcacactgccattcctgaaaagaacacatctcttgcccctgacctgaagcttcacagcccaatctgagctggcttcatcttccgcagctcccaggctgcttcatgtggaagagggaatccctgggaaaggcttctgttcccacatttgttaactttctccagatattcttccatatttttgagtatgaattccatactgtagtgagtgctgtaaagaaagacttttactaggaaaattatttatcatttctcaagtatttcttgcattcctacagtatgccctgtctatactggatctgaataagacgaaaagagtcctcacaacctaactgtgcaaagatcaagccaaccatattttagaaaagctgttttgaccatgaccctgaatgagatggcccagggagtaggatttaaagagagttctgagaactcagctttaaggcaaattaagagaaggcctctgatgcatgtctgagcttccagtgccctgagtctcctctccagtcctgtcagcctcacccaccattctcctggtacattgtcaaaaatggtcattggctgagccagaatatgtatgtgatgttttagaactcagtaaccttccaggaagtggcagtggacttttcccaggaggagtgggcattgctggaccctgctcaaaaaaatctatacaaagatgtgatgctggagaactttaggaacctggcctcagtaggtaaggctggcctcatttcttcatttgtttatgtagcaaatagttcttaagcacatattatgttccagaatctgtggaaagaatagcaatacagtggttaaccccaaaatgaatggtccctgcccttgagggggcagtccagtggcttcccatgaaaatgcactgatttcattttctctatcactaatagcttaaggtaatttgcaatctgtgtctcatcttgtgtataggtttcaagggtcacttccatatagggcgtggaccatgctttttggttcttgtgaaagaaagagctcggctctgattgttttgttgttcctaaagctgcacttgactattttaataatcctttagttaaagccaaagtatggcaatcagttttgtggaatatttaattctcacacatttctcccacatccttgctttctgcgtgagcagggtatcagctctgcagacacagtctgatctccaaggtggatcaagaacagctgaagacagatgaaagaggaattttacaaggtgactgtgcaggtgagccttgggcagaacagggtgcagccttggccagtgagggttagtacatttgggaatgtcactcagtgaaggaaaagaaatctgaggccatgacatgagcttccttcctgtttcaccatctattcaatcgttcatacgttcatttggtctccgagaaagaagttttaattcctctttaaatgtaatgtctccatgaatgctttttgccagataatactgtcttatttcccaacctccacaatcctttctaactaaaatacctcccatttctactgcttgttcctatcactggtgaatcactggttgtgtcttctttcttacatttctctacttagaagatattatttgaaaacaaatccatagggtctccctccctttttctttgatcccaaccttttctcccaataattataaaaattcctgtgctatttcagactgggaaactcaacttaaaccaaaagatacaattgctatgcagaacattcctgggggaaaaacatccaatggcataaacacggtaagacttactaggaagtattcctggtctttgtagtagaagtctgggaatctgaatgagttaaaacatcagcacccaaagcaggggtaagaattcaggcaccaggctttcaccagaaagctgtctcgggagagtttggagtttgattttcatgaaattggagaaatctgtaaacctaggttaacacttgctggctcacagagaataaccacaagtaaacatctatgtaaatatgattttagagttaagtatttagtacataattcattcattcttcactcagtattagaaaaactgtattaaagaagccctttgctgggaaggaatagagccttggacagaggagtgagcttattcaactcgaaaaagctaatagggcaaaagtcatacgcacctactgaaaatggtacacatgtcagtcatgatcatgtgcttcctatatatggcagaatcctcatggaagagaattcctgtgaataaggtgaaagtgaaaaagcctctagtcaccacttactcccttttcaacaggcagaaaatcaacctggtgagcactccctggagtgtaaccattgtgggaaattcagaaagaacactcgctttatttgtacaagatattgcaagggagagaaatgctataaatatataaagtatagcaaagtcttcaaccatccctcaactcttaggagtcatgtgagcattcacattggagagaaaactcttgaatttactgattgtagaaaagctttcaatcaagagtcatccctcaggaaacacttaagaactcccacaggacagaagtttcaggagtatgagcaatgtgatatgtccttcagcctacactcttcctgctcagtacgtgagcaaatacctactggagagaaaggtgatgaatgcagtgactatggcaaaatatctccccttagtgtccacacaaaaactggtagtgtggaggagggtttggaatgtaatgaacatgagaaaactttcactgaccctttgtcccttcagaactgtgtcagaactcactctggagagatgccctatgaatgcagtgactgtgggaaagccttcatttttcagtcttcccttaagaaacacatgagatctcatactggagagaagccttatgagtgtgatcactgtggaaaatcctttagccagagctctcatctgaatgtgcacaaaagaactcacactggagagaaaccctatgactgtaaggaatgtgggaaggctttcactgttccttcatcccttcagaaacatgtgagaacccacactggagagaaaccctatgaatgcagtgactgtggaaaagccttcatcgatcagtcatcccttaagaaacacacacgctctcacactggagagaagccttatgagtgtaaccagtgtggaaagtccttcagcacaggctcttaccttattgtgcacaagagaactcacactggtgagaaaacctatgagtgtaaagaatgtgggaaggcctttaggaattcctcttgcctgagggtacacgtgagaactcacactggagagaagccttataaatgtattcagtgtgaaaaagcctttagcacaagcactaaccttataatgcacaagcgaatccacaatggccagaaactccatgaatgaaatgactcagggaagtgtttgttgcccctcatgcctcctttctcactttagaacatatattggagagaagccctgttatggtcacctggaaacagccttctggcccaactctggatgcctgttatactgggacaaaccttataaatgttatagctatgattgtttttatcagtgagtatttcattcttatatgtgtcacaactgtagatcctatgaatattttagttatcttttcagtttaattgcattgtgaacagaacacatggtcttcaatatgtagattctgtgtgacatagatttgaacataattgctggacactgactgatgtactgtggcagacagaactagttgctgtctcaatatccattcctcccttctttcttaaagtaataaaatttaccatttagttcaagctggcaatgtggacagttttcacccagcttcccttacagctgtgagcggccaaatatgttcacatccctagcccatgcaaagtaggcagaagtcactggatacagctgctaaggaagctcatggaaatgggaatatctcatctggtgtttttttcttaactatttgccctttgtcttgtcccttatttcctagaaaatatatacaccaagaggaggacagagaaaggatactaaatgaaacaacaggggagatacaatattatctggttgcactaatcctgtgctgcttatctctggatttcatgttacatgagaaaaattaactgccatgtggtttaaaccactcttgtgggaagttcctctttcagctgatttcagtcccaactgttacatctaataaatggtcaagttttaggaatcgttcaagtatggttgaaaaattgtgttttctgaggcagaaggatcacttaagtctaggagcttgaaatcagctgaggcaacacagtgagaccccatctctaccaaaaaaggaataattaggtcttgctgtgttgcccaggctggagtgcagtggtgtgatctcagctcagtgcaacctccgccttctgagttcaagtgattctcgtgtctcatcctcccaagtagctgggattacaggcaaatgccaccacgcctagctacttttttgtatttttagtagaggtggggtttcgccatgttggccaggctggttttgaactcctgatctcaagtgatctgcctgtgttggcctcccagagtgctaggattacaagtgtgagtcaccgcccccagccaaattgttttctttaaaaatctctctctctaggccaggtgcagtggtgcatgtctgggagcccaaggcgggcagatcacttgagcttaccagttcaagaccaagcccagccaatgagccgaaactccatctctacaaaaaacaaaacaaaaaaaagttagccaggtatggtattgtgtacctgtaagtcccagctactcagtaggctgaggtgagaggatcacctgagcccaggaggcagaggtagcagtgagccgaggtcatgccactgcattcctgcccgggccacagcaagaccgtgtctcagggaaaaaaaaaaaaaaaaaactctccttttttggggggcactgtaattgggtacatttaagtttactcattttatgtttctggcaaattgtgctattagtgcccatacttttcccctaataactaatgttcattaatttactacaaatgtgagctactgacctagaaataccattttctcaacctgtaaggacaaccaggagcaacttactttttctcagcgttacatcagttatactgttgcttgcaataacatccagcaggtatggtcatctttacatcccacaacttgtcctctctattgatgcctttatgagttctttcgtaagacagacgtgaatgtttgttggggaatacacccaaacattcaggctaaccacctgaagtttctaggggttcagttgtctggcgcttgtcaagatattccctctaaggtgaaaggagaattgctgcaatttgtactactaatcacaaacagcacaatgcttggtcggtttttttggtttctggaggcaccatattgacgcaatatgacaacacttggagaatttagaaaaataacacgttctcggccagacgcggtggctcacgcctgtaattccagcactttgggaggccaaggcgggcggatcacctgaggttgggagttcgagaccagcctggccaacatggagaaaccccatctctaccaaaaatacaaaattagctgggcatggtggtacatgcctgtaaccccacctacttgggaggctgaggcaggagaatcgcttgaacccgggaggcagaggttgcagtgagccgagattggaccgttgcactccagcctgggcaacaagagcgaaactccatttcaaaaaaacaaaaaacaaaaacattctggcagtatatgagggcaggataacaaactcagacaaggacagaatgaagcctgaaaaccttcaaaaataatttatgaaatagaaggaaactgggttttttttttttttcgtttttttttttgagatgcagtctcgctctgttgccaggctggagtgcagtggcgcaatctcagctcattgcaaaccttcgcctcctgggttcaagtgattctcctgcctcagcctccggagtagctgggactacaggcaagggccaccacacccagctagttagagatggggtttcaccatgttgtccaggatggtctggatctcttgacctcgtgatctgcccacctcagcctcccagagtgctgggattacaggtgtgagccaccatgcctggccggaactgggtattttttaaaaagaaaccatcatatcgcatttaaatttatccagaaatgcaaagttggttttacattagaaaaatcaataaatacaattcacttttaaaataggcttattactcattcactcatactaataattactaggcacctagaatgaatgaggcagtgttcaaagcatttaatgcattattgaaaaaataggataatctcagtagataaagaaaaagccataaagaggtattactgagaaaaatctttgaaaatatgataaacattgtataaaaaaatgcaaaagtaaacaataaatgaatggtggaaaatagaaaatgagtttaaaatcaggaagatgacaatggtatccactacttagtattttactggaatcttaagtgaggcaggctaggaaaagatatttaaaaacctaaggaccagaaaggtagaagtaaatctgtcattatttataatatgattacctaaatggaaaatttcaaaggatctatatttaaattaatgaaaatgtttactatcttaataaagataaacttgcaacttatactcaggaatagaaataataaaatttaaaagtcaataccatttataagagcaacaatggtataacatatggaagaataaattttaaacttaccaaaattgtggaagaataaattttaaacttaccaaattgttttgaagacagtattgaaaacattaaagatgacgtaaacaaatttgagacattcattgaaaggtcaaattctgaaaagactcacttctcccaaactgatttagattcaaaaagttccaaatacagctccacttccagattggctgcagacatttacaggaacccacatgaataaacagtgaactaacatcttcaaagaccctggaaatctgtggacaaaaaaaggagtgaaagaattaaatgccagaggatgagctcctcctagaagagcagaaatcagtggctggtttcttccctgaaggcattttcctggtctaggagcagattggcggagagccaggcctgccacaggcagaggaactttactggaatatggagagaccagggggcattaatggtcacaaggctagtgtgacactataatataaaatagactctctttaccagtgctgcgtatccctataatgatttgctgagtgtgtagcaacagctggtgctgggcactaaccaggaaaaaatggatatccctattgtagtgcttagattccacagtcctgttagagggagtggtctgaaatagtcataggaaagatcttactcaagatgtttgaaacccgaagtgaaccaaaactaatttttacatcccaacctctgattggatcaaagttgaggagattctcacctaaactgcttggcagaggaaatggagtgacttccagatgaaaatatttttcaatttctgctgttcttttaagcataatatccacatccaacttaaaacatcacatgatgtgcagagcagcaggtcaatgttaccaatcatcaggagaaaaaggtccaacaaaaatagacccatagatgatatgagaagttggaattagcagacaaggactttagaattgttatagaaccaacaggttcatatgtctgctgtgtagtagcagaccaattacacagacacggattaagcagagagtttaattaccacagggcgccaagtaaggagataggaggagacatctatatccccaagaagttccaggctggagttttaaaggggatcagggagggtgaaggactggagaattagggttgttgatggtcagagcaagcaggataaagtcatcaggatgtggaaactagattctttggtaagtcagctcgtggtgcccctcagaccagctgagtcaatggggtccttcagaccacctgaaatggtaggtatatcagcatgtaaaaagtgtgaaagagtatctcaaaggaaaaacttaatgttttataatggtcaagttatcaatagagtagttaatcttgtaacagggtgatatggtttgcctgtgttcctacccaaatctcaccttgaattgtaagaatccccacctgtcatgggaaggacccagtgggaggtaactgaatcacgggggtgggtttttctgtgctgttctcatggtagtgaataagtctcacgaacgtatgattttataaaagggcagttcccctgcacacgctgtcttgcttgtcaccatgtaagatatccctttgctcttcgtcttgggccatgattgtgaggcctctccagccatgagggtctgtgagttcattaaacctctttcctttattagttacctagtctcaggtagtatgtccttattagcagcatgagaacagactaatacacagggtctacatgattctaggacaataggcaccagtgaactatgaagaagtaggtcagagattaaacttcattaatgttgaatgtgctataagcttggtttttcatttatccctctctcttctttcctgattaattttataaagtttataggggcagtttcagaattgcccctataacttatgacagatacgttaaaacaaaaaatttcaaatggatgaaaatatatatagaattgcaggccaggcgtggtggctcatacctgtaatcccagcactttgggaggccaaggtgggtggatcacgaagtcaggagttcgagaccagcctggacaacatggtgaaaccccatctctactaaaagaaagatcagccaggtgtggtggcacatgcctgtaatcccagctactcgggaggctgaggtaggagaatcacttcaacttgggaagcagaggttgcagtgagccaagattgcgccattgcactccagggttgggtggcagagcaagactgtttcaaaaaaaaaaaaaaaagaaagtacataaaattgcagtatctaagtggaatctctaaagtagaaacagacaatctagaggtaaaaattataatttctgaaattaaaaaaaaattctgtaagtgggcctaaaagcaaactaaacacagcaaataaaggtgggggagagggcaatcagtgaactcaaagataggttaacagaaatgtgcctaacttacggacacgggaaaacaatgagtgttttctaaaactgattaaaaacatcaaaccagcagagtcaagctcagcaaacctaagcaggataaatgcaaagaaaaccacacacagttcaccatcaatctgttaaaaaaaaaaaaatcttaagaaagagaaagtacgttcaggattttaaaaaatgtggctgacttctcagtgacataacagggagaagaaaaatgtaattgtatctttaaagtgctgaaagagaaaaacctaattgtatgctttgcaaaaaaaatcttcaaaaatacaaaattccattttgagacaaaagctgacaaaataaattgtcaaacttgtgctatgggaaatactacaggaagtgtttcatactgaagagaaataatcccaggctgaggtgcatgcagattgatgggatgaaattaaagagtatggaagggcaaacaggtggacaaatataaaatactatttttttaatttaaagactattgattgattaaagcaacaataacttagtgtgaactctgtaataagttccagggtctgtatgtctgcttttacaccagtaccatgctgttttgcttactgcagccttgtagtatagtttgaagtcagatagagtgatgcctccagctttgttcttttttattacccccagacagggtttcattctgccacccaggctggagtgcagtggcacgattgtggctcccttcagcttcaacctcccaggttcaagcaatcctcccgcctcagcctgccgaatagctgggactacagacacatgccaccacacatggcaaagttttgtattttttgtaaagatggggtctcactgagttgcacaggctggtctcaaactcctggactgaagtgatctcacctagggctccagtgatcctgtcttgggcttccaaagcactgagattattaagtgtgaggcactgcacctggatctcctcatctttttctaaagccacaagtcctgcagggtacaggagctcatgcctgtaataccagcactttgggaggccaaagtaggaatactccttgaggcctcaaaggtttgagagcagtttgggaaacaaagcaagactgtctctacaaaaaaatgtttttaaaaataagctgggcgtggtggtgtgcacttgtagtcctagctacttcggaggctgaggtgagaggactgcttgaggccaggaggttgaggctacagtgagccatgattgtgccactgcactccagcctgggtgaccaagcacaagaccctgactcttttataacaaaacaaaacaaaaaaagccaccagtcccactcacataacctattaatctattaacccattaatccctcaatctattaatgaattaatccattcaagagggcagagccctcaagaccagtcgtctcttaaaggccccacttctgaatactgccacatgggagattaaatttcaacatgagtttttggaggggacaaatattcaaactatagcattccgccccggccctcaaaaactcttgctcctctcacatatgagtacattcattccttctctatagcctaaatgtctcaagttattccatcaccaactcaaaagttcaaagtccagagtatcatctgtgagcctgtgaaatcaaaacaagttacctactctcgagagacagtagtggtacaggcataagacagacattcacattccaaaaggggagaatgaggaaaaagaagtaacaggccccaatcaagtctgaagcccagcagggcagaccataaatctgcaagctggagaatcatctcttttgactccacgtgctgcctcctggaaaaactgaggtcacagtttgaccccccaaggcctcaggcagcccagcccctctggttttgctgggtgcatcccaaatagtggcttatacagtttgaggacttgtgcctgaagacttcctaggtgggcgttgcatgctgctggttactctgcagttttggggtcctgatggcattcttactcccatagctccactaggtattgccctggtggggattctgtagcagccccaacgtcacatttctgcatgtgaccatggctctggtcgggactctctgcagttgctctatccttacaacacgtctatgcttgggcctccaggcttttgatgacatcctttggaatctgggtggaagctgccaaacctccattctgcaagtctgcagaattagctgcacatggatgccaccaaagtttatgacctgtaccttctgaagggcatgagctgcacctgggtcacttaagctatagctgggcagccacagagcactgtgcagaggtgcagggagcagagttccaaggcaactcagcagcaaactatggagaatgactggtctgtcccctgaagccactgtgccctcgtaggcctctaggcctgtaatgtgaggggcaaccttgaaaatctccagaatgccttcagggtctttcttccattgttttgagtaaaagcacccggctcccttctgtgctaatctcttcagcaaaggatcactagggtacgaccttagtttccccacctgaacacactttttcactctatgtggccaggctaagagtttcccagatttttccatggtgcttcccttttaacataaattctgtcttttaagttgttcttttgcttctgaatcttggcacaaatagccaaaagtaaccatgcaactcctatgtgttgcttagaaatttctactgccacataccctagttcatcactctcaaattaggccttccacaaagccctcaggcatggatcgagttcagccaagttttttgccagtttataacaaggacagcctttactgcagtttccaatgccttctttctcaattccagctgaaaccacatcagaatggcctttactgtccatatttctatcaaaattctagacacagccacttaacaaatctctaaggcgttccaaatctttacctagctttgttttctaagccttcatcagaatctaggctttttctagtctgctcctccaaattattctaccttctgccccattatacccagtttcaaagctgcttccacatgttcaggtatttctcgttgtcagtaacaccctacttcttggtaccaattttccagaattccatgaactctaccaccagttaacccaatggtaactggaacatattccagctaagaaattcagcagtttattaaaaattaatggatctaggccaggcatggtggctcacacctgtaatcccaacacattgggaggctgagatgaggggatcacttcaacccaggagtttgagaccagcctgggcaacaaagcaaagccttatctctacaaaaaatgaaaagatttgctgggcatggtggtacatgccctgtggccccagctactcaggaggctgaggttaaagtattgcttgaacccagaagtcaaggctgcagtgaggtatgatggtgtccctccactacagcctgggtaacagaatgaaaccatgtctcaaaaaaaaacctcagccaggcgcagtggcttatgcctgtaatcccagcactttgggaggccaaggcaggtggatcacctgaggccaggaattcaagaccagcctagccaacatggcaaaacaccgtctctactaaaaaaaaaaaaaaaaaatacaaaaattagccgggcacagtggcacacacctgtaaccccagctactcaggaggctgaggcaggagaaccacttgaacccaggaggtggaggttacggtgagccaagatcgtgccactgcactccagcctgggtgacagatcaagactctgcctcaaaaaaaaaaaaaaaaaaaaaaattgggtctagacactgagcaccaatgactactaacactcacaaaagagacaccattggacattatgtaccttctgatcaaagatcacatgtgccaccacctccccaaaaatgaaactgaatcttatctctagatccaactatgatataaaaagaaatacgctgacaaccctatgagaatgcaattagcaaaatccacactacacataactctagatcttaatccaggtgcttcaaaaaataaaacggggaagactaaaaaatgacatccaaaaatgagcaaaaattaaataatgtttggggttccacatttgggtgaaaggtaataaatgattactataaaagtcatgagagtggttactctgagggaagaaagaggcagttgtgactgggacatggtatttgaggcaaagttctacatcttgaacggggtcgtggttacaagagtatttgttatttaattcatgaaccacacatttaggtcatgtgaaaaaataaacctaaacctgatctccccttaccaaaaaatactaggaaatacaagaggaaatcttcccccaactacccttatgaggctggcataaccatgctatgtaccagataatatggcagaaaaagaaaaccacaaagctatctcacaaacagattggtcaggtacagtgcctcacacccataatcccagcactttgggaggccgaggcaggaggatgactggagcccaggggttcaagactggcctaggcaacatagggagaccctgtctctacaaaaatttaaacattggccagcatggtggtgtgtgcctgtagtcccagttattcgagaggctgaggtgggaggatggcttgagcccaggagttcaaggctatactgagcctgatcatgccgctgcactccagcctgaatgagagtaagactctcttaaaaaaaaaaaaaagtgtatgaaaagtcaggaactatagtttctataaatatatgttaattactttttctggcagggcgcagtggctcacgtctgtaatcccaacattttgggaggctgaggcaggcggatcacttgaggtcaagagttcgaggcctgcctggccaacatgatgaaatcccgtctctactaaaaatacaaaaattagctgggcatggtggtatgcacctgtagtcccagctactcaggatgctgaggcatgagaatcgcttgaacccaggaggcggaggttgaagtgagccaagttgcactactgcactccagtctgggaaacagactctgtctaaaaagtaaatatatatatacatacacacacgcatacattttcaaagtatatgttcaatttggttttttttcaaccatgacctatctttataggtgaagcacctccaaattagcatcagggggtccaactgttaatctaaaaaaagtataatgaatacactactaccctgaagtttcagactttttggccattatacattatgttaacaattagatccattgctttaaatttagttatttcatctgaaaagttttccggaggccaggcatgctggctcacacctgcagtcccagcactttaaaaggccaaggcaagaggattgcttgagcccaggagttcgagaccagcctcagtaacgtagtaatactccatttgtatataaaaaaaaacttttttaagaagaaaagttttctggagattgaaatgtatccaatttaatatcctctttgctctcaggtattttaccagtgtttctacaatgaatgtggaaaggtttcacaacaaaaccaatctttggcctttcctccttccccctttctcttccttttcagcagagtgtccttttggaaggtacccctgaggtgtgggggactgcaggggccagcatgtccacagccaagcttttgggtaacacagatgcaaatgagggtttaaaagccaatgaggataatggaagctagccttctcactgagaaaagagttacaaacaggaaaggggaaggtgagaataatacctgtcctgattaattgaaaatattagtgtaaagtcctgttaacatataatataggactcaaatgtgtatacttatatccacaaatgtgtttaggtagaaaaacacttattctctactcctgtttgctgagaggccctgaaagcaatgaatccaaggtagcaatgataatacttagtgcccagaattggtttctaaataccattatcctcttaaaggaactagagctctttggagaaaaggctgactccagggctggagaaggaaaaatatgagatgagcctagaacatcttaagactggaaagttctcatggaatgacgggtcatgtcaaggggatacaggaggcagccaaggggccttccactggccaaagctgggacaactagagcaaaataagtaatgagtatatgggaacccatgaattcacactgctacaaataaatgaagaaagaaatagggaggaaaaaaatctctaacctagagcagtacgacaaacgggaaatctggaaggcacagacagttggaaagaaaaaaaaattgccgggtgtggtggctcacgtctgtaatcctaacacttcaggaggctgaggtgggcaggtcacctgaggtcgggagttggagaccagcctgaccaacatggagaaaccccatctctactaaaaaaattaaaaattagccaggcataatggctcatgcctgtaatcccagctgaggcagaagaatcgcttgaacccaggagccggggaggttgcagtgagccgagatcatgccattgcactccagcctgggcaacaagagcgaaactctgtctcaaaaaaaaaaaaaaaaaaaaaaattggcaactattataataataattaatccagacaagaatcattactggtggatgagtttctaagaggaaaaagatatttacatagtcttaacacattgccccctaaaagcatttaagtataacctacttttaattaatgcagttttgcaacttttcagtctaaagaaaaacaaaaaattaaattaaaaaaattaatgcacagtggagaaacttgccagacactatcttaaccaagagataacagcttacaccactattagaaataatggggagtggccaggcgctgtggctcacacctgtactcctagcactttgggaggctgaggagggaggattacttgaggtcaggagttcgagaccagcctggccaacatggtgaaaccctgtctctacaaaaatacaaaaattagccgggtgtggtggtgtgtgcctgtaatcccagctgctcaggaggctgaggcaagagaatcgcttgaacccaggaagcggaggttgcagtgagccgagatcacgcaccactgcactccagcctgggtgacagagcaagactctgtctaaaaacaaaaagaaaagaaataatggggagtctttggtggtttgtgttgtgggtctttatgatcagtgatgaggtctattcatctctactgtgagaccacaggggtcagtggggttagtgagtgatatggtttggctgtgtccccacccaaatctcaccttgaatggtaataatccccacatgtcaagggtggggccaggtggagataactgaattacaggcagtttcccccatactgttcttgcggtagtgagtaagtcaagatatgatggacttataaagggaagtccccctccacaagatctcttgcctactgccaggacattgctcctcagtcgccttctgccatgattgtaaggcctcctcagccatgtggaactgtgagtcaattaaacctctttcctttgtatattacccagtctcaggtatgtctttattagcagcatgaaaacacatcaatacagtgaggatttgtgaggttagtgatgaaggtctgtagggacagtgattaggagtctctggggtcagtaacatgtacactgtggggttagtgatagagattccttaggagcagtaatagggattatacagagatcaatggaggaatctctggtgctatgttgcagctctgtggggtcggtgatatatatgaagcggggtcagggatgtgcagtctgaaatcaatggtgtggctatgtgggggtcagcgatgtgatcccaagggggcttggtggagattcagatggtcagtcatactggggaactgtggagtcattgatggaaggtccgtgggattgctcattgggaatttagaggtaagtactgtggcgcccatagaatatttaccagggatggaaagtgcattagttaaggtcagtgatgggggttgaggattggtgatggggtgtaggtgtgtaatatgccagtggtcaataggttagatgacgagggctataaggaatgctattcattgtctataagaaacccactttaattaaacagacacatatagattaaaagatgaatgaagaaagatataccatgctaatgacaatcaaaagaaagcaggagtagctatattaatttcagacagagcagacttcaacttttttaaattacagatgtggggtcttgctacattgcccaggctggtgtcaaactcctagcctcaagcgatcctccacctcagcatcccaaagttctgcattacagatgtgagaccctgtgcctggaccagagcacacgtcatatcaaggaaagttatctgggataaagaggggcataacttaaagagaccaatattccaagaagtcataacaatccttaatgtgtgtacacatgacagagcatcaaaatgaggtaaaagctagtagaactgcatggagaaatagataaaaccactattatagctggagatttaaatacccctttatcgccaggcacagtggcacactttgggaggccgaggcggttagatcacgaggtcaggagtttgacaccagcctggtcaatatggtgaaacctcgtctctactaaatatgtaaaaattagccaagtgtggtggtgcacacctatagtcccagctacttgggaggccgaggcaggagaatcgcttgaacccaggaggcaaagggtgcagtgaactgagatcacgccatggcactccagcccaggtgacagtgcaagactccatctcaaaaaaaaaaaaaaaaatgaaaaaataaattaattaaaaataaatacccctctatcacaaatggacagatccagcagggagaaaatcagtaagaatgtagtaaaactcaacagcattatcaatcaactggatataattaacatatatagattacttcatccaaaaccagcagattatacattcttctcaagctcacatagaatattcatcaagacaggccacactgcgggtcatgaaacacctcttaacaaatatgaaagaactgaaatcatacaatgtatgctctcagatcacaacagaattaaactggaaactaatcaaagacagctaaaaaaatctcaaaatacttgaagatcaaacagcacacttctaaataaataggtcaaacaagaaatctcaaaaaaagtttaaaaaatttgcactgacaacagatacaacttaacaagatttgtggggtgcaacaaaagcagttcttcgggggaaatttataacactgaatggttagaaaagaaaaaagatctgtgccaatcatctaagcttccaccttaggaaactaaaaaaaaaaaaaaaaagcaaattaaatccaaagtaagcagaagaaaagaaataataaaaattcaaggccagacatggtggcttatgcctgtaatctcagcacttttggaggccagtgtgggaggatcacttgagggccaggagttttgagaccagcctgggcaacacagctagactccatttctacaaaaattttaaaagccaggcatggtggcacatgcctgtactcccctctatttgggtgactgaggtggaagcatcccttgagtccaggagtttgaggctgcagtgagccatgatcatgccactgcactcctgcctggacaacaaagcaagacactgtctcaaacaaaaaacctcaagcaaaagtcagtgaaattgaaaacagaaaatagagtaaaatcaacaataccaaaagctggttctttgaaaggatgaataaaataaacctctcatcaggctaacaaagaaacaacagagaagacacaaattactaatagcagaaattaagaagggacatcactacagatctcataaatatgaaatggggggcggagccaagatgtccaaataggaacagctccagtctacagctcccagcatgagtgatgcagaagacgggtgatttctgcatttccaacttaggtaccgggttcatctcactggggagtgtcagaaagtgggtgcagcgcaccgagcgtgagctgaagcagggcgaggcatcacctcacctgggaagcgcaaggggtcagggaattccctttcctagtcaaagaaaggggtgagagacagcacctggaaaatcgggtcactcccaccctaatactgcacttttcaaatggtcttagcaaacggcacaccaggagattacatcccacgcctggctcggagggtcctacgcccatagagccttgctcattgctagcacaacagtctgagatcaaacggcaaagtggcagtgaggctgggggaggggcgcccgccattgctgaggcttgagcaggtaaacaaagtggctggaaagcttgaactgggtggagcccaccgcagctcaaggatgcatgcctgcctctgtagactccacctctgcgggcagggcacagccaaacaaaaggcagcagaatcctctgcagacttaaatgtccctgtctgcagctttgaagagagcagtggttctctcagcatgcagctggagatctgagaatgaacagactgcctcctcaagtgggtccctgacccctgagtagcctaactgggaggcatcccccagtagggggagactgacacctcacatggctgggtactcctctgagacaaaacttccagaggaacatttgctgttcaccaatatccactgttctgcagcctttgctgctgatacccaggcaaacaggtttggagtggacctccagcaaactccaacagacctgcagctgagggtcctgactgttagaaggaaaactaacaaacaggacatccacaccaaaaccctatcagtacatcaccatcatcaaagaccaaaggtagataaaaccacaaagatggggaaaaaacagagcagaaaaactggaaactctaaaaatcagagcgcctctgctcctccaaaggaacgcagctccgcatcagcaatggaacaaagctggacggaaaatgactttgacgagttgacagaagaaggcttcagatgatcaaactactccaagctaaaggaggaagtttgaacccatggcaaagaagttaaaaaccgtgaaaaaaaattagaatggctaactagaatagccaatgcagagaagtccttaaaggacctgatggagctgaaaaccaaggcacaacaactacatgacaaatgcacaagcctcagtagccgattcgatcaactggaagaaagggtatcagtgatggaagatcaaatgaatgaaatgaaacaagaagagaagtttagagaaaaaagaatgaaaagaaacaaagcctccaagaaatataggactatatgaaaagaccaaatctacatctgattggtgtacctgaaagtgacagggagaatggaaccaagttggaaaacactctgcaggatattatccaggagaacttccccaatctagcaaggcaggccaacattcaaattcaggaaatacagagaaagccacaaagatactcctcaagaagagcaactccaagacacataattgtcagattcaccaaagttgaaatgaaggaaaaaatgttaagggcacccagagagaaaggtcgggctacccacaaagggaagcccatcagactaacagctgatctctcagcagaaactctacaagccagaagacagtgggggccaatattcaacactcttaaagaaaagaattttcaaccagaatttcatatccagccaaactaagcttcataagtgaaggagaaataaaatacagacaagcaaatgctgagagattttgtcaccacctggcctgccctacaagagctcctgaaggaaggactaaacatggaaaggaacaaccggtaccagccactgcaaaaacatgccaaattgtaaagaccatcaagactaggaagaaactgcatcaactaatgagcaaaataaccaactaacataatgacaggatcaaattcacacataacaatattaaccttaaatgtaaatgggctaaatgctccaattaaaagacacagactggcaaattggataaagagtcaagacccatcagtgtgctgtattcaggaaacccatctcacgtgcagagtcacacatagactcaaaataaagggatggaggaagatctgccaagcaaatggaaaacaaaaaaaggcaggggttgcaatcctagtctctgataaaacagactttaaaccaacaaagatcaaaagagacaaagaaggccattacataatggtaaagggatcaattcaacaagaagagctaactatcctaaatatatatgcacccaatacaggagcacccagattcataaagcaagtccttggacacctagaaagagacttagactcccacacaataataatgggagactttaacaccccactgtcaacattagacagatcaacaagacagaaagttaacaaggatatccaggagttgaactcagctctgtaccaagtggacctaatagacatctacagaactcttcaccccaaatcaacagaatatacattcttctcagcaccacaccacacttattccaaaattgaccacatagttggaagtaaggcactcctcagcaaatgtaaaagaacagaaattataacaaactgtctctcagaccacagtgcaatcaaactagaactcacgattaagaaactcactcaaaaccgctcaactacatggaaactgaacaacctgctcctgaatgactactgggtacataacgaaatgaaggcagaaataaaaatgttttttgaaaccaatgagaacaaagacacaacataccagaatctgggacacattcaaagcagtgtatagagggaaatttatagcactaaatgaccacaagagaaagcaggaaagatctaaaattgacaccctaacatcacaattaaaacaaatagaaaagcaagagcaaacacattcaaaagctagcagaaggcaagaaataactaagatcagagcagaactgaaggaaatagagacacaaaaaacccttcaaaaaatcaatgaatacaggagctggttttttgaaaagatcaacaaaattgatagaccactagcaagactaataaagaagaaaagagagaagaatcaaatagatgcaataaaaaatgataaaggggatatcaccactgataccacagaaatacaaacaaccatcagagaataaacacctctacgcaaataaactagaaaacctagaagaaatggataaattccttgacacatacaccctcccaagactaaaccaggaagaagttgaatccctgaatagaccaataacacgctctgaaattgaggcaataactaatagcttaccaaccaaaaaagtccaggaccagatggattcacagccgaattctaccagaggtacaaggaggagctggtaccattccttctgaaactattccaatcaatagaaaaagagggaatcctccctaactcattttataaggccagcatcatcctgataccaaagcctggcagagacacaataaaaaaaagagaattttggaccaatatccctgatgaacatcaatgcaaaaatcctcaataaaatactggcaaaccgaatccagcagcacatcaaaaagcttatccaccatgatcaagtgggcttcatccctgggatgcaaggctggttcaacatacgcaaatcaataaacgtaatccagcatataaacagaaccaacgacaaaaaccatatgattatctcaatagatgcagaaaaggcctttgacaaaattcaacaacccttcatgctaaaaactctcaataaattaggtattgatgagagtatctcaaaataataagagctatctatgacaaacccacagccaatatcatactgaatgggcaaaaactggaagcattccctttgaaaactggcacaaaacagggatgccctctctcaccactcctattcaatatagtgttggaagttctggccagggcaatcaggcaggagaaggaaataaagggtattcagttagtaaaagaggaagtcaaattgtccctgtttgcagatgacatgattgtttatctagaaaaccccatcgtctcagcccaaaatctccttaagctgataggcaacttcagcaaagtctcaggatacaaaatcatgtgcaaaaatcacaagcattcttatacaccaataacagacaaacagagagccaaatcatgagtgaactcccattaacaattgcttcaaagacaataaaatacctaagaatccaacttacaagggacatgaaggacctcttcaaggagaactacaaaccactgctcaatgaaataaaagaggatacaaccaaatggaagaacattccatgctcatgggtaggaagaatcaatatcgggaaaatggccatactgcccaaggtaatttatagactcaatgccatccccatcaagctaccaatgactttcttcacagaattggaaaaaactactttaaagttcatatggaaccaaaaaagagcccacattgccaagtcaatcctaagccaaaagaacaaagctggaggcatcatgctacctgacttcaaactatactacaaggctacagtaaccaaaacagcatggtactggtaccaaaacacagatatagaccaatggaacagaacagagccctcagaaattatgccacatatctacaaccatttgatctttgacaaacctgacaaaaacaagcaatggggaaaggattccctatttaataaatggtgctgggaaaactggctagccatatgtagaaagctgaaactggatctcttaaagacttaaatcttagacctaaaaccataaaaaccctagaagaaaacctaggcattaccattcaggacataggcatgggcaaggacttcatgtctaaaacaccaaaagcaatggcaacaaaagccaaaattgacaaatgggatctaattaaactaaagagcttctgcacagccaaagaaactaccatcagagtgaacaggcaacctacagaatgggagaaaatgtttgcaacctactcatctgacaaagggctaatatccagaatctacaatgaactcaaacaaatttacaagaaaaaaaccaccccatcaaaaagtgagcgaaggacatgaatagacacttctcaaaagaagacatttatgcagccaaaagacacatgaaaaaatgctcatcatcattggccatcagagaaatgcaaatcaaaaccacagtgagataccatctcacaccagttagaatggcaatcattaaaaagtcaggaaacaacaggtgctggagaggatgtggagaaataggaacgcttttacactgttggtggaactgtaaactagttcaaccattgtggaagtcagtgtggtgattcctcagggatctagaacaagaaataccatttgacccagcaatcccattactgggtatatacccagaggattataaatcatgctgctataaagacacatgcacatgtacgtttattgcagcactattcacaatagcaaagacttggaaccaacccaaacgtccatcaatgatagactggattaagaaaatatggcacatatataccatggaatactatgcagccataaaaaatgatgagttcatgtcctttgttgggacatggatgaagctggaaaccatcattctcagcaaactatcccaaggacaaaaaaccaaacaccacatgttctcactcataggtgggaattgaacagtgataacacatggacacaggaaggggaacatcacacaccggggcctgttgtggggtggggtgagggggaggaatagcattaggagatatacctaatgttaaatgacgagttaatgggtgcagcataccaacatggcacatgtatacatatgtaactaacatgcacgttgtgcacatctaccctaaaacttaaagtataataaaaaataaaaataacaaatacgaaatggataataaagcaatttcatgaacaattctacatccacaaatttgaaagcctagatgaaatacatcagtgatgtgaaagaaacaatatgcctgtattagtctgttttcatgctgcttataaagacatacccgaaagtgggcaattcacaaaagaaaaaggtttaattggactcacagttccacgtggctggggcggcctcacaatcatggtggaagccagggaggagcaagtcacatcttacgtggatgttggcaggcaaagagagagcttgtgcagaaaaattcccgtttttaagacagtcaaaactagtgagacttattgactatcacaataacaggatggggaagacttgccccatgattcaattacctcccaccgggtgcctcccacaacatgtgggaattcaagatgagatttgggtggggacacagccaaaccatatcactgccaaaactcacacaagaagaaacagacaatctaaatagatctgtatctataaagaaaaagaataataacattccaaaacaaaaagcaccaagtccagatgtgttcactagtgaattctaccaaacatttaaggaagaaagtaagaaagtatgccagttttctacaatctcttccagaaaaagcagagggaatactttctaacattctgtgaggccagcatcaccctaataccaaaacgaaagacattaaaacaacagagaactacaggccaacaccatggctcacaaatacagatgcaaaaagtttcaacaaggtcgagcatggtggttcatgtctgtactcccagcactttgagaagccaaggtgggtgggtcacttgagtccaggagttcgagaccagcctgagcaacatggcaaaaccccatctctttaaaaaaaaaaaaccaaacaaacaacaacaacaacaaaaaccaatcctgtattagtgagggttttccagagaaataggattaataggatttatataggtatataccacaccttttttctccacttcttttccccacaacacaacaagcggatgacaatatttgtgagtcataacaagttaaatgaaacaacatggttaacttaacaaacttctctataaacttttcttgattctctaaaaactgtccaattttttccttgcataaagccaaattagacacagaaaatggcacatgttcccttacttccactagctaccacccacaatgcacacaggtttcactttaggggccgatatggggccccactcctggtgatactggttgggcttactctcttgggaagtgggagggataggggctagtttgcataagggggaggcgtgagtgatgaccttggggtgggttccttcattgaaaaactggtaggaagcccctcagaattgggggactgaagagaccctggggaaaacgtaagccttctaaagggagcagctaggaggggatcccttaggcatggcattctggtccctggaattaacatgagcctgtaaagagccataaaagcctgtacataagggacgtcttcccattttcctttttacaaaataagtctaattgtaaatatcattataatgtatagaaccatatgtaggccaaatctgttagttttctaatctgtattgaacccaaacagtgctgcaacaaaaaatgagtctcttcttaagacgaatttgaacttgctccaatagcgtaaaagacactccagtgccaagtcctctgggatgcttgctgttgtccccaggtcgactaaggatcgctacagggggtttcagcctaagtttagcaaatgtctagttaattttcccttttaaattcccaccttccagaaaggtgtaaatataaatagcagggtgttataaaagtggattaggagctaaaaatggacagttggatgttgaacctaaattccagagggctgggcagagaggagctaaacaaatggtaactgtggaagggaggaaaggaagggggtaagcagcattgcccaaagggagacctcagaggccctgaccacctgagaacctactcaatagtggagacaccaaaaaaaaatattcatgtggcacagacctgttttagctagtcttcaatttggtggggtgtccaagcccactagactccagagtctagtcccgcctcctacctcaccgtcaacttacttttagcttataaaccttcgtatgtgcaaggcgcggtggctcgtgcttgtaatcccagcactttgggaggcccaggagggcagatcacgaggtcaggagttaagcctggccaacatggtgaaaccccgtctctactaaaaatacaaaaattagctgggtgtggtggtctgcgcctgtcatcccagctacttgggaggctgtggcaagagaatcacttgaacctgggaggtggaggttgcaatgagcggagatcgtgctgttgcactccagcctgggcaatagagtgagactgtctcaaaaaaaggaaatgacaagagattaattacttagtgaatctagggcaatggtggtttgttgtaccagactttgacattttcttcagtttgaaaatttccaaattaacaaggtaaggaaaatccacttggaaaaggctcttgctgtttatggtcaactcaattcccatttgtgatacaaaaacaagcctgcatgttctctttttttctctggagatgcttgtattttgaagcttagagatttacagggttctgagctgaataccgagctgattttccgtgacagtaaaatttgcatttacatgcattcattcacccatgcatttaattgtgtcagatgcccgtactccctaacaatgagtttctaatttctccacctgtacataatttaccaaatataaagaacatcccccaaaagaacaaattcacccagtgttcacccaaactggctggaatcccctggtcggtgaagctgctggggacaaaacaaccacgactccagcaagagattttcttccttctgcagaaagtctgcaaaggctgatgaagaggcttgggaaaggggagaccgcggacgaaaaggccccaccgaagctcgctgcccgcactcccgacccgccttttacctggacccaagcccccagcggcgcaggtgggagtctgggaagaagtgcggtgtcggcaggaagtcccagcgcgacgtccgggaaagccacaggaggaggcgacctgcaggaggctaccctttgaccccaaccctactctccagtcctcctagtctggtgggagcaaccttagactggttgatgtggaaggaggcgggcctgcacgcggagtacggcattcacttccgtttccgggagcgcacttccgtttccaggcatgagggcaacgggggaggggggggaggtgacctggaatgggctgagaaacaggagccacgagagccgcgtggtgacgttagaagggcgctacagccgcgactttccaaagctagtagagagatcccagcgtcccccgggaaaggcagaaggggcggggcgataccaagacggagacaatggggcggggcgatgccctggaggcgggattgcctgtgggagagccacccttcaggccatgcagaccccaggtgaaatctgcacaggggtctcctggagccgtgggaggggttccccttcttctccttcaagagcgtttttatgttgccctctttatggatggaaaacagaggcatggacgggcggtgtaacttggccacattcactaacctaatgaagaagtctctgaaactggatcctgggtcgctggaggccttacaccctcctccagggactatgataaatatcagtctacaagcaaagaaaaactttggaatttaaagccctgtgtactgtagttcttcctatatttttgacaaccaaaccagaacctttatatcacacacatacacacacacaaaccctttttggcattttctaaatatccgtgtgaataaaacacctgccaagacgtggtaggatttaaaagtgatttggggcgggtgttttattcacgtctgcaatcccagcactttgggagacccagatgggaggattgcttgagcccaggagttagagaccagcctgggcagacccctgtctcctaaaaacataaaaaagtgatagggaataaatgtagaattgccataggtcataatttgtttaatataaagctgctacgcttttaggtctgacaaacttcctctccctgtgcggttgtttcctgatataacccacgtgttcctcatctcacagctgctgactcctataaaagctaatgaccaacaccacagtcatgtaaataaattccccccttcatttttttccctagccaatcgacagtcacgtgaagaaagactgaaggacaaacccatggtccttaaaaggcacagtcccacaggccctctctgtctcttcatctctccagtaacctacccacaggttgagcaccatactgtctctggacttcctgtgggccattattcagcacccctaacttctctggaatctataataaactttttcctttcattgattttggtttcactttctcattgtgtctcacttgacacacttgaacttaacatcctccaccagctctcctagagagtggctatctcgggccggacatgttggctcaggcctgtaatcccagcactctgggaggccaaggtgagtggatcacctgaggtcaggagttcaagaccagtgtggccaacatggtgaaaccccgtctctacaaaaaatataaaaattagctgggcatggtgggagatgcctgtaatcccagctgctcgggaggctgaggcatgagaatcacttgaacccaggaggcagaggttgcagtgagctgagattgtgccactgcactccagcctggatgacagagcaagactcttaaaataaaaaaattaaaaaaaagagtgtggctatattggcttttggcctttctcaagagagaaacctcaagaccgagttggaaaataaacattaatactaaaaaatgataccaacgtatgatccagcaattccacttctgggtatattaatcaaaaagttgaaagcaggtactggaagagctatttgtacacccatgttcatggcagctttattcacaatattgaaaaggtgaaagcaaatcaaactgtggtatagccatacaatagattatccagccttaaaaaaggaaattctgagatgtgcagaatttgaacatgaacatgaacatgttccttgaacatgttccttgatcatgaacatgaacatgaaccttgaacatgttacgctaaatgaaataaactagtcacaaaaagtcaaatactgggacttcacttttatgaggtacctacagtagtggggttaacacagacacatgttggaacaactaagttcctcttcaaagactcaactttctgatcataagttataaaagttgtacatcaatcctaccccctttcttctcttctgtttccacaaatcgcacatttaccctatttggaaaagtttaagtcttagccaatcgggatcagcttagattgtgcagtccaatcccagccaattgggggacgacacagaaacaggaactgcattaaattaaaaactccttcccttctttgttcatcgtgctcttgcgatcgtaacgggcacaagcagcacccttctgcagaagtaaaggtgccctgcggagaaattttctagggggtttcttttggctatgtcgagcacttgtttccaacagagaattgaatggtgtttgccagagattgggaagggagcagtagggagttagtgtttactgggttcagtttgggaagataaacattttttagtgggatgatggtgacagttgcccaacaatgtgagtatacttaatgccagcgaagtggacacttaaaatggttaaaatgtaaactttatgtaatatactttaccacaattcttaaaaagtgaatagaggattattagttttatttaatgaagcctccaaaaaccagagatctggggcaaaagaaattcaaaagcagtttggctagcagtgcattttatacagtctctgctaaataaaatacccactgataagtaaagggtttggaattgtattgctaacattagatttatacattagaaacgtgtgtttaaaacagacattctctatcaactggcaaataaaagatttttaaaggattaggttttaaaataagtattaaattagatgctgcaccaaagaatatattggtttaaaaaattgctcagtgccgggtgcagtggctcatgcttgtaatcccagcactttgggaggccaagaggggcagatcatctgaggtcaggagttcaagaccagtctggccaacatggcaaaaccccatctctactaaaaatacaaaaattagctgggcgtggtggcacgtgcctgtaatcccagctactgaggcgtctgaggcaggagaatcacttgaacacgggaggcagaggttgcagtgagccaagatctctccactgcactccagcctgggcaacaagagcaaaattccatctcaagaaaaaaaaaaaaaaaaaaaaaaaaaaaagctcagctgctgtgtcagagaattaaacaatgagttaaaaacctaacactaaacagtatttttaaatgtcctcatcctgtcctcacccagattccaagcatcaaggagtcacgctcttgaggaaaggtgcgccttgtccaggagctccagaagccacctgtgcagaaatttcaccagtctccaagtcctgcagagcagtcacatggcactccagacccaccctgcaatccactgccccaaaagtcaccatggggtgaacacagctcaacattggtggaaggtgtgggtgccttaacgcattcattaaccaataactgtgggctttgctctagagacagaactaaagcccccaccctcttctactctgttagtggagcctgcggtttttatgggcacaggatgagggcggggcaggccatgagtggttttgaaaaaggcaacatttgaactggaaaagaaggatgtgaagttatcactttgggccaatctgaaaagttacgtactgcacaattccaactctatgacattctgaaaaaggcgaaactatggagacagtaaaaagatgagtggttgtcgggctggggagagggagggaggaatagtgggaggaccgatgatctgtggactttgggtgataatgaagtggcaatgcaggttcatgaattctaacaaatgtattactctggtggagtatgttgatgatggtggaagctatgcatatgtagtggccgcaggaatataggatgtctttgaaccttccacactattttgctgtgaacctaaaactgctctgaaacatggattttttgttttgagacagcgtctgactctgtcacccaggctagagtgcagtggcacaatctcagctcactgcaacctccttctgggctaaaatgattctcctgcctcagcctcctgggtagcagggactataggcataagccaccatgcccagctaagttttgtcttttttgtagaggcggggtttcaccaggttacccaggctggtcttgaactcctgagctcaagcaatccactcacctcagcctctcaaagtgctgagattacagctctgagccactgcaccaggtgaacacggatattttaaaagagtaataaaacattttcaattggtcagagttttccaatctgagaagtcaacattatttagctgaactaccactctccaaaacctcttacactaataggatttctctctactgcaaaaccttacttaagcaatccctgagataacagcaaagggctttccatgtttcacagactgtgtggtctcattgcaagttacttcctgctgggttgtgaagagattctgacagctttcccatatttcttacattcacatggctatgaactgtgatacagtaagatatgagaagcaaatgaagtacttcctgcatcctttttataatcacagggttttaccccagtgtgaattctcacaaagatattaaggcttgagcaatgaaataaggtgacaccatatccctgggatacacaggttcttcctccaatgtgagatttcatgttaacattatggcatgtgagatatttaaaggttgccatacattcccctacattcccaggacatttgcagtctaattttattttattttttttgagacagagtcttgctttgtcacccaggatggagtgtaggggtcttggctcacttgcagtctaattttagatatgtaaaatgagcctcgtggaattagtaaaagctttcccacgtgccttacagcagaagtgttctctacactgtgaatttttatttctcatgtaaggtataaacatttaatgaaatctctccacattactaataatggagcctcagtccactctaagtcactaaatgttgggtgaagtcacatttatgactttcatagtaaaagaaactttctcttcttgatggtctttgattttcacagggcctatcaccacaagagttggaagtgagtattaagatctgatgagcacttacagacttcttcacatgtcctacattcatagaacgtctctcctgtgattgcttttgtgtttacactaacactaatgatagctaatgaacggaaaaaataatcacaaaaaaattttattatgtttgaagaaagcttaaaaatttgtgttggtctgcattcaaagccatcctggcctgcgggttggacaagcttgatctaaagcttttcccaagttcctcacagtattagtttcctagggttgctgtacaaaataacagactgaatgatttaaccaagagaaatttattgcctcacagttctggagcctggaagtgcaatatcaaggtggagacagggttggtttcctctggaggccataatgaaagcatctgttccaggtctctgtccttggcttgtagatggccatcttctggtggatccacacagtcttctccatgtgtatccttccttcagtttcccttatagggacaccagtgatgtcagattagggatcgaacccaacaacctcatttgaagttactcacctgtttgaaaaccctatgtccaaatacagttatagtgtaaggaactaggacttagggcttacaaatatggagtggggcatcatccagaccataccatttaaattgcagggtttctctccaatgtgagttcacatacacacattaaggtttgtgggattcagaaaggtattcccagattctctacattcatacagtttctctccagtgagatttctgatgtgtttggtaaggcttgagaattcagcaaagtcatttccacattccctgatgcagggtcttctccactgtgaattcatatgtgttcattaagacctgagatacaaagttgcttccacatttttacattcatagggtttctccccagtgagttttcatgtcttcagagagaacagggacacctttaggttttcccacattccttatgctgacagtctctcatccgcatgccttctttcatgatttcgaaaggaactggaagaactgaaggctttcccgcactccttacattcatagggtttctctccagtgtgagttcgttcatgtaactgaaacgaattggagtaactgaaggatttcccacactgtttacatttgtagggtttttctccagtgtggatccgcatgtgaaggttaacacacgtgggaaacttaaaagctttgccacattccatacacgtgaatggttttttggcgctgtgggtccgcatgtgattattaagactggaggaatgcgtaaatgctttaccacattccaggcactcaaagggcttctctccagtgtgaattctcaaatgtccactaagatttgaagaaatagcaaaggctttcccacatttgacacattcaaaaggcttctctccagtgtgagttcttgtatgttcactaaggcgagaggatctggcaaaggcctttccacattccttacattcatagggcctctctccactgtgagttcgtgcatgcttagtaaggtctgagttctgagtgaaggctttcccacaatccttacatttatagggttttattccagtgtgaattcgaaagtgatcactgaggcatgaggaatttctaaaggattttccacatatcttacattcaaagggatcctttgcagtgtgagtttttaaatgttcagtaagttgagaagatctagtgaaggctatcccacattccttgcattcataaggcttctcacccacatggattttcatatgttgacttaagcaagaggaaacagtgaaggctctcccacaatccttacatttataaggtttctctccagtgtgagtttttctgtgctgagtaagttgacaagacctggtgaaggctttcccacactccttacactcatagggattgtctccagtgtgggttcccatgtgaatattaaggtatgcagaatatctaaatccttttccacattccttacatttgtagggtttttctgacctgtgagtttgtatacgcacagcaaggtctgtggagtgaataaagcctctcccacattccttccattcatggagactttctccattgtgagttcttaaatgtccctgaaggtgtgaatgattaatgaaggatttcccagagtcactgcaatcaaaagctttctctcctgtgcacgttctctggcaaacaacatctgggttcaggctgaaggcttttccacactgactaaatacagaacgttgctctccagtagaggttttcttgtgcagagtaaggaagtctactccatacagataacactcaaatgtgttctcactattttgagttctcacatgtgtcttaaggcatgagtgttcactggagacatctccacattgcttaacatcactgacctcccctccgttgtggcttcctatctgttgataaaggaatgaatgatgattaaaggacggttcagattgattaacagattccactcatctgaagagaggaacactgtgatgattattatcatgtttaccattttcattacacacatataagtaatgcccttttgatttctttccagcggaatgacaaaaaactcctgccaggctgtgccatctactctaatctcaaatgtctgtagagttttatgaaattgtcttaaaaactcactatctagttacaaatgtgtacttgaggggaactctaaaacacctaagtgttggctgggcgcagtggctcacgcctgtaatcccagtgctttgggaggccaacgtgggcagatcacctcaggtcaagagttcaagaccagtctggccaacatggtgaaaccctgtctctactaaaagtacaaaaactagccgggcatggtggcacgtgcctgtactcccagctactcagcagggtgaggcacaagaatcgcttgaacccaggaggtggaggttgcagtgagccaagatcatgccactgcattccagcctgggtgacagaccaagactctgtctaagaaaaaaacaacaataagtgtcaagctagatttcaagcatccccaggtcatcgtattctgagtctctctccagagtcattatcccttttgggaatgctacttatctcaaagagctctcattctgctaattttctttttcttttaatgtaattaaatttagtttttagcgccaagatcttgctacgttgaccaggctggtctagaactcctggcctcaagtgatcctcccacttcagcctcccaaagtgctgggattacaggtgtgagccaccattcccagctttattctgattttctataatggaatccccaatcatctctaaatgtgaaaactaagacgtatccttgttaatcttaccatttgaatcccactggaggttggctcccccaaaacatcctgctgaagggctaactctttggttttaagttgcactttccattctgaagctgaagagaaaaagaaatgtaagggtttggagacatacagggtagacagatggagctgaaaatgagagggatcatttgtacttgttttctttttttcttgagacggtgtctcactctgttgcccaggctggagtgcaatggcgtggtctcagctcactgcaacctctgcctctcaggttcaagtgattctcctgcctcagcctcctgagtagctgggactacaggcacatgccacaacgcccagctaatttttgtatttttagtagagacgagatttcaccatgttggccaagctagtctcaaactcctgacctcgtgatccacacgcctcagcccctcaaagtgctgggattacaggcattagccaccacacccggcccctgtatttgttttcaaattaaacacggtaacaaaaaacaaacacaaagacagatttgaagattgtatatcaaaaatttggcaataataaggatatagcgtcaaaattttacatagtttactacaaactgattctatgaaaattataaactgatggtgaacacaaagaatattaccatggaaggaaagttgaggaatagaacaaaaagcacacatcaaaacaaggagcttgtttttgttttttgtttttttttttttttgagaaagactttcactcttgtcactcaggctggagtgcaatagaacaatctcggctcactgcaacttccgcctcccaagttcaagcgattctcctgcctcagcctcccgagtagctgggattacaggcacctaccaccaagcccagctaatttttgcatttttagtagagacagggtttcagcatgttggccatgctggtctcgaactcctgacatcaggtgatcctcccacctcggcctcccaaagttctgggattacagacgtgagccaccgtgccaggccttttttttttttttttttttttttttgagacagagtcttgctctctcaccccagctggagttcagcggcacgatcttggctcattgcaaccttcggcccctgggttcaagcgattctcctgcctcagcctccctagtagctgggactacaggagtgcgccaccacgcccagctaatagttgtatttttgtagcgatggggtttcaccatgttggccaggctggtctcaaactcatgacctcatgtgatctgcccgcctcagcctcccaaagtgctgagattataggcgtgagccaccacacctggcccaaaacaggaacttttaaagaagaaaccaacgggtcctatcacagaaaagaatgagtagacaaagcgtaaaagtatgagaagttgaagatttcttaacttctgagaaagaaatggcctacctgggcatggtggctcatgcctgtaatcccagcactttgggaggccaaggcaggtggatcacttgaagtcaggagtttgggaccagcgtggccaatgtggtgaaaccctctctccactaataatacaaaaaattaaccaggcgtggcacacacctgtagtcccggctactcgggaggacgagtactcaggagaattacctgaacccgggaggctgaagttgcagtaagccgagatcgcaccactgcactacagcctgggtgacagtgaaactgtgtctcagaaaaaaataaaaataaaaaaaataatggcctcaacactgtgagatgaagcacatcttaaaaagtttcctcattatggctaagcgtggtggctcacgcctgtaatcccagcactttgggaggccgaggtgggcagatcatgagatcaggagtttgagaccacactgaccaacacggtcaaaccccgcctctactaaaaatacaaaaattagccaggcatggtggcgtgagcctgtaatcccagctactcagggggctgaggcaggagatcagaaggctgaggcaggagaatcgcttgcacctgcgaggcggaggttgcagtgagctgagactgtgccacggcactccagcctgggtgacagagtgagactccatctcaaaaaaaaaaaaaagtttcctcattatacttataaacatactgaacttattgaccagggcggtcctttgtgaacactcaccttggaaatcacctctctgcactgtcctagactcttcttgttccagccaagagatcagactgggtttgaagagctgatatcctgtgcacaaagaaagatacattaccagaagaggctcatgcaagagatgataaatctttccacaactcaggagatatagttccaatggaagcagtgaaattattttaaaagggctaaaaatgcaaatatcgtctgtctgtgcccccaaaagattggtgatctctgatccctgaagcccaaatccaggctgatgtacacacttacaaagcactaagacttttatccaaataggaagttaagtgaaacaaagagatcttcattctcatgggaaacaactatacatctcattcttcaacattatagcacatcagattcatgagagcttgttaaaacacagatgacaggggccctgttgcagtttctcactgagtatgtcaaaggtggagactgagaacatacatctccaacagtgctggtgatgctcttcatctgacaccacattttgagaatcaccaagtagatgaaaccctattagggcagggactatgtctgttatttcccattgtgttcagagttgctatctctgatgtgcaatacagtaagtacataacataatctgttccatagtaggctacaagggatgaggccagtcttacctactgtggccaaattcttgtagttctccagcatcacatctctgtagaggtttctctgagttgggtccagtaaagtccattcttctggggtgaagtccacagccagatcatcaaaagtcactgaatcctaaaccatcacacacatgctggcttgagccacaaaacatgtctaccagtgttcactgcaaaatgcaatacctacagagtctgagggctcacattgcccaccccaggaggtcctctctatccacactcactcactgtcagtcccctccagtgacacggcttgaatggcacttcttacacatgattgtatgtaacacaaccagactgggaggtcatctgatttccctccactgcagcacactcttgagcagatgctagataaacactgatgaatggaaagattatctcaaaggatactttcatgtcccttaccatgtgtcagaacactcaacaaaataaaaactatgcagttgggaccatgagggaagactaattaatcaatattgaaatactgggatgacattcaaggcaaaccctcaccaatatgacaggctccactccttccgggaattcgactagggactcagtccttgaaggaggctttatttgctttaagaagctctgaagataattctgtgtagaaggaaatgtgtctacctggtgatgcaagtatgatattttggagaaggatatacttcctgcatacctgataacaatttgtcagacagtcagccaccaccctttctacttctgtcttttcttgaaggcagactgggtccctgtaaagacctcatggaaaagaaagaaggcatgagaacccagggctgacgataattcccacattcacgtaccccaaagtcattccatcctactgtgagattcctatatactcccgcacactcaagaaaacacacacatacacaccaccgctatcaattccagggcactactgcctcacgtaaaggcaaaaaaaaggatagtcagccatgctgcccactgggaaaagggtaacagtcttattttacagataaggaaaacttctcttccctggaaagacacagcacctcttcccaaagcacacacagcagggggctgatgaagtattctggctgggcgtgatggctcacacctgtaatcctagcactttgggaggtcgaggcaggcagatcacttgaggttaggagttcgagaccatcctggccaacatggtgaaactccatctctactaaaattacaaaaaattagccaggtgtggtggcacacgcctgtaatcccagctactcgggaggctgaggcaggaaaatcgcttgaacctggggggcagaggtggcaatgagctgagatcatgccactgcactccagcctgagcaacagagcaagactctgtctcaaaaaaaaaaaaaaaaaaaggaacaaagcattccctagcccacatcagcacctcagaaatgaagctgcagcgtgaatgatcaggcacaggccactggactccatactgtgtggggggggacacctaaagcagggtatctgaaaatgaacagaaacaggacttaccataggacaaatcagtggctgccatcccacagggctgatggctgaatgtgcttcaaagcacctttcctttactccaaggatcactccaggacagcttaggaatctacacggacagaggtaacctccattctctttatccagggttaacggtatcctgtttgtataaatcattaatcaacaagcattacttatcagtcatcagacatcattagcactctctctgcagagcatatagaggaaaagacactgaaaacggtgtacactacaaatagtaggaagaccaacttccactactgaggaacagtgtgtgtcagaagtcacactagcagctttatatactcgcttaattatcataaccaccctttacagtagataccaatgacccctatttgataaagaaaaaatcaggccgggggcggtggctcacgcctgtaatcccagcactttgggaaaccaaggcaggtgtgtcagttgaggtcaggagttcaagaccagcctgggcaatgtggtgaaaccccatctctactgaaaacacaaaaattagctgggcatggtagtgcatgcctataaatcccagctactgaggaggctgaggcaggagaatcgcttgaacctgagagacagaggttgcagtgagccgagatcacaccacggcactccagcctggcaacagagtgaaactctctctcaaaaggaaaaaaaaaaaaagaaaaagaaaaaaaagaaaacctacaatcagacaacacttggatttggtccagaatcatccagtttggaagttgtgaaccaggacttgaacacaggcaattttgtccctgacacccaatctgtggctgctcttactttcccacatgaccagcgttagtctaaacctgcacagtacaacaccatggtcactacccacatgtgttattgaacacccactccatataaaccgagtatgacccaacaacagaatgtattttaatttaataaaatttatacaattaaaataaaatttaataaaaattaatcacaatctttaataaatcaaacacagaacaacagtgcaaatgctgattgacagaatggaatctgaacgatgaaaatcactgaaaactgaacagttcattatccatgaaccagatacacccccacaaggacgctacagcctttattctatgaatgagaaggctgaaactctgaggtcacactgggttacagaaaccccatgtctagactcctggtgtagattgtacccactaccatgggtttcaaactggggatccttaggctgaagagggccacaaatgtgtttaatttggtgaaatctaaaccaattatgttattttaaacttgaaatgtaattaatgtacaattaaaagtacagatcttaggtattcagtggatgaattttgacaatcgcatacacttgcataatcaaaagcctaaacaagatataaaacatgttcgtctccccatgaaaaccttcttgccccttccagtctatcttttcactctcaactccagataagcaccctgtgatttccttcatttagcagacacaacactggacaggtaaattaggcagtgtgctcatctctcgcaaatgtacatcctatcttcatttttctctactatttaaataacatgagataaaaattctaaaatctcccactgcaactgtggacttgtctatttcttcttgtgtatctgtaatgtatactcctttatacatcttgtaacaacattactgggtagatagatacacacattgaactttcctatttttggagcaacaaaacctttctttttttttttcttttgagacggaggctcgctctgtcacccaggctggagtgcagtggcgcgatctcggctcactgcaagctccgcctccaggttcacgccattctcctgcctcagcctcccgagtagctgggactataggcacccgccaccacacccggctaatttttttgtatttttagtagacacggggtttcaccctgtcagccaggatggtctcgatctcctgactttgtgatctgcccgcctcggcctcccaaagtgctggattacaggcgtgagccactgcacctggccacaacaaaaccttttttttatcataaggaactctgcgagtctctaggaatgttcttggatgatgctgggtgacactgcaacttgcttttctttgtggagtctctgtatctcatgggcagccttaggtatctttgggtgccaatgttccccttgacctggcatggagcctaaaggcacccagtgatggctggacagacaactgagatccttctcaacactgttaaagtacacccagactacagccccatcacaattcataacacaatatgcatctgagttctgaggaaatgcattgaactactcaaagaatgcaagggtgacaggaatactgtctctttctatgcacttagccaccacccatggcctgtctgcataccaaagactggtttcccctggccacttaatgtggatatttagtgctctcagtcttgtatccttactggcaccccaacttcctctgctcatgagcacaatagccagggttgcctgcattccagagggctgcttcctgctttccccgagtccaatgactagctctagtacccgctaaaagtgcagagcagaagcactacagccccgctaaaggctgaccctgaagggggcagtactaaaggaaaatcttccgagtggcagaacttcaggcagtgtattggcctgcttctgggtctggagtaagagttgacaagatgcatgcatacacatacacagattcatcaaaagttgccgatggcttggctggatggtcaaaaatgtggaatgaaccagagtggtaacaaggaaacctaggaaaaggtatatggatggacgtctctgaaaggaaagattgtgtcccacgtgaatgcctgccgtgatccactagaaatagagcagacaaaatcacgtgctctaaagatacctgttactttacctagctgcacctcagtgcttgctcaatgggcccattaaaaaatgttcatgacagcagggataaaggctatgtgtgggctcagcaataaggacttccccttaccaagtctgacccagctaacattactgctgggcctaatctcctgaaagcagaaatcaacactgagcatccaatacagcaccattccttagaggagaccagccagccatgctgtaatgggccctcttctatcaggaaattgtcaaagactcatccccaccagaacagactcacgttccggtgtggatctgcctttcgactagttaggcttctgctggcaccaccacccacggaatcacaacatgctttatcagtagtcatggcctccacacaacagagtttctaaacaagcaaagcatttcactgcagaggaagtgcaacaatggaagcatgtccttgaaatcaactggttccatcacacaccccatcactcagaagcagtggatctacatgaaaagtggaatcgcatactgaaaactcagttatagggccaaatgggggacaacccttagaaaggaattctgactcacaggtcaaggtgtacgctttgagtcataaagccttccatggtactgtctccccagagtcagaatacatgggtccaagaattgatgagtaggccaggcgcggtggctcatgcctggaatcccagcactttgggaggccgaggcaggtggatcgtttcaggtcaggagttcgtgaccagcccggccaacatggtgaaaccccgtctctactaaaaacacgaaaaattagctgggcgtggtgacacatgcctgtaatcctagctacttggaaagctgaggcaggagaatggcttgaacccgggaggtggaggttgcagtgagccgagattgtgccactgcactccagcctgggcgacagagcaagactccatctcaaaacaaaacaaaaaaatagaattgatgggtgaaggtggaattaactccactgacagaagtttgcttttattcccagcaactcagagcactgctggtctggagatcttcttagaccctagaggaaaatgccccccccagggggcacagctatggttctaatgcattggaacaggagactgccacttggcccttttgggcttcatataccactaaaccaagaggcaaaaaaaaaaaaaaaaaaaaagaaaaaagttaatctactggctggagtggttaatcccaattatcaaagggaaactgtggcactactagacaattgaggcaaggaggatgaagtgatgaggtgtagaacctccgagtacttctatactccatagaaaaggttaatggaaaaccacaactgaacgaaagcaggacaacagaggattcggactctgggcgaacgaagatttgtattgctcctccctggtacaaaacccggagcagctgaggttcaagtggagggcagggaaaatatggaattagtcactgaagaagtaaaccatggacatcaactacaacctcaagagcagtgacagaaacaagaaatgtagttttgcatgttttctctctgcttgttatacgtatgtgtgtttatatccatgtgtttatttatttaaatgaaccatttacttctatctttttcccacttttattttatatacacattattagaggttacatttataattttgtctttaagaaacagaatagttagaatgggactaaatttgaggagtaattgacatggcgtgccatgggaatacaaaggactgtttgaactgcgcatctgctcctttgggggtgggtgaggacttcttccctcatatcttcttaggtaggaatatagacttgtttaattattccaaagaaattcctatgtgtgtaggagagtgcatatggatggtaaagaaccaaaagtgaaatatgccagttagctgtttatttatctcagctccaatacccccatcgtctttgtcttagttaaaacttcccctgcctgtgtagctgtttgttatacagcctgcttgttcctcacctcactggccccaaatccaacacatctcacagctgctgactacagtgaaacttagtggccaacaccagagtcatataaataagaactttcctttgcgcaaccaatccacaacccccaaaggaagtcctgagggataacgtccatgcaccttaataacgcaaggcccaacaggtcctctctcattcctatcccacaggttgaacacccggctgtctctggacttccatcagcccccgagagcagcctcccatcctggggatctgtgagtaggaggatgcttctgacatttcatgtgttttgttgtgctgcctcctctacatcttgcccgcccaacacactggaatgtaactctcctcccggtctgggtagggctagaatttgcagccactctccagagagagagagaccccctagaccaaaacagaggaaaatatattcagtgtggtgaacagggtgtgtggtcacaacctgagggacacaagaccaggccttcagattgctcttggcctgtttactacctggcccactcacatggctgatgccatatgggagggctccacagcctgctggggtacctctctgctgctgtgcattgctgcctgttgtctctgtgaagcactgccaatactcccatccctaaattgggtgggtcctccatagtccaagcgctccctaggactcaccaactgctagccttaagagggcaagaggggcacgacagtcactatccaagactgctgtcacttccccaaataggaactgctgggctggaggaagccaactgtattcccaaggcctcactctggcataacgggcttgctactgagaggcagaaggggtaaggcaggcgctgggccaatcaaagggttagcggagtgcaagaggaagaccggcattctgactgcccactgtatggataagcagtacagacgaggccaccagacttcccactctgacaacagtagcaaccccttcactggggagatgacggcacctcgctggcaaggttgctgttggggtctgctatccccaggacactgccttccattgcatctgttgctctacgcccccaccctgacgaggtcaactgggcaccctagagagaaaggcggctgcctacaaaggggtcagatgggaagcacaaatggaggccagaggacccggggccactcgggaccaccgggagcttgtcaggtaaacaaaggaaaaaatattttagccacctggagatacaagccattctgaagattttacttagaagaaaaaaatagagggaaagaaactgattgtcttgaggtctggagttcccagtcctctgttgcctagaagcactgggcgccttacccctccttcttttcctcttatcaaccagagacagaaattaagaacccttcaggcagttaaaagtctaagaccaaaaaaaaaggaaaaaaagcctcgagatttaggaggttacaagttcaagaaaaaaaaaaagaggaactttttgaactttaagtactaaacaaatgccaggtctaacaaacataatcccgctggccctagattacttaatgatttaaacacagaccatgagacatggggaaaaaaataaaaggtaactagactttaactaacatttggtaaaatgtaccaattaacaaaactgcataggcctactcaatctggggctcaaattacacttatacctggggatcccactaaattcaaacattgtgctccctaaaatcttaaaagggtaactaaatacaggagaaaaaaaataggtacgcctcgctttaactgtagccttgcttaaatctcccattgtcatagtacccatggccctaaaatattccatattaggtataaatatgctaacataataaataacaaattaaaattaaagtgagactttgacacttacaaattggcttgataaaatgggaccccatggataattagttgaaatatttcacatggcccaatgtaagttacaacagggcctcaaggatgaaaacttctataaaacctaattaatgaaggggtgattatccctactgcttctctatttgacagcccaattgtgcctgctcttgaatctgaaaaagaaaataaagggcacctcatgctggattactacagccttcatactgtggtcccatccatcaaggtgcccacacccaatattattaaaactcctgattttattcaataaacaaccaataactattgtgcttttaattataaatttgaccaacatgtttgtttgtttttttttctgagattgagtcttgctctgtcacccaggctagaatgcagtggcacaatctcggttcactgcaacctccgccacccagggttcaagggattctattgcctcagcctcccgagtagctgggattacaggtgtgcgtcaccatgcccagctaatatatatatatatattttaagtagagacagggtttcagcatgttagccaggctggtcttgaactcctgacctcaagtgatctgcccacctcggcctcccaaagtgctgggattacaggtgtgagccaccacacccggcctggacaacatgccctgttcagtgcctatttcaacagcctctcagctgcagcttgcctctccctccaatgggacacaacacaccttttccaggctacccaacagatctgtcatcacatacgatctttgcaaacgagatcttaacaacatccaccttctccaggaacacaggtatgcaccgcaccgataacagccttccccaaggaaactcttgacatgtcattaaggggaagtaattccagtatcttttagtaatttttgggttctggtggcaacatatgcctgatttacaaattataatttaaattaaaatcaacaagcactcctattaatgcctcgaagaaaaaaaaaagaaaacggggggaaaaatcaacttcctaaaaggactcccttcatgctagagactggcaactttttaaatgcctgctggagtctctagaccacttacgatggtcattagctgccccaggccgtctaggagagactgcccctcctgacttcctgttattcaccagtaaaacaagtgactggccatctactgggctctcctggaaacagaggatctcacagacctgagcctgtgatcctcctatgcagctgcccactgtgctctaggtcagggaaacaaccccccataagctctgcctggccactgaggcctccttaggccacgatgaagccaatctcaggcccttgggtctaatccacccgcagaaggcagtggcttcccctgttctcagtcccttgcctgatgccagcgtgctgaaggtggtcactcctccctcccacaggtcccctgactacctggaaagcccctgggattaactaagtgaacactaatgggagttcatagactgtgcaaaggccactgctgaccattataagtgatggggctcagtggaatgctgctgccttccatcccttagccaggatgtccctaataaaggacaggacccaagaaacaacgtgcctggccaaacttcaggcagctgtcttagcgctggatgcccaggtcaacaaaccgacccaccttcttcatggttacaataaactattgggtcattacctaaaaactgtcccttccagggtgggaaaaaaaaaaaaaaaaaccctgggaatctcttgtctgacagatacccaaaatataaagcaaaatcccatacctctccaaacactaaaggcacaatacgaggccttgccaggacactacttattcccttcagagttacagacattattagtaacctacatatatatttcacttcttttttgtcaatttaattttttttttaagaggcagggtctcgctatgttgcccaggctggtctcaaactcctgggctcaagcaatcctcccacttcggcctcccaaactcctgggattacaggggcgagccactgtgcccaacccatgtttcatttcttaaaatacataatgctagcgcctcgaaaaatatattcaatagaactttcatttccctaataggtctcagataactggtttcactgaaagacagaaaaatgtcctcaaataactacttttcaaattccagtccaaaaaacaaactcctgaaattctctatcatgctctagggcttaacttattttcaatcttgcccccatcccacaaacactgaaggccaaatcgagggtgcacagtcgcctgggacttactaacattagattgtcccagaggcccggcagctgctcatctgataggggacccacctgaacctaaacttccaccaaaagacagaaacaaaaacatgttgtcaggtacagctacatatcattctgttaacggttcgtcttactagatgctttgttggtttacaacctagagggccacatctacttcaatgggtatccactttataccccagtgacatcctagacgaccttgtcctagcccaaaatatcaccgctggaaacaacattgcctccagcaacacagccctgacccaagactctgatggtggagatgactccaccattacactaaaacctccacacagtgacatccgtggactgcctctcctaaaacacaaatggacacagaacatttttttctttctgaactgtctgcttagcccctgatcctggtagcgtacttgcattctgctcaaatgtgcacacccacatacccaagcctgaaggaaaatctggtaggagttactaaaattaatggagattactgttttccccaagaggcacctgcctcatgtcggtaaactccttaaccccagggaggggaccacctactccatgatgccttctaatgaagaaggaattcatgaattttacaagtacaatcaaagacgagcaaaaatttttactttttcctgcaaaagctaagtgtagcgtagcccctcctcctaccccacccccccacccagtagcctaagagagaatactaactgcctgtttttccttctgtgctcagccagccttatctgtacttgctagtttcacactccttgaggctcagtgagttcctgcttcacctccctagcgcagctgcaaagttacaaggttaatacagaaacatggtttcccagggatgtggaacatgtagtatagataaatgtaaaagactgatcaactgccttcgttctcgcttctgtaagtacgcttcctgtatcagtagctcccggccagagtgctttaaaggtggctgctttctttgtccagggctcagactttcctggatgccagtcctcctgagccaggtgatcaccttttaaagacctttcctgaactcactctgttcagtctctcccatcgttgatcgtcccgcaacactactacccttctcactttctatcttgacctccagccttgcctatccaaccacaccactcttgccccttggttacacacaataccactaacctttacatatgctttactaaatcatcagctcataccctccaacataactgccctacatctatttttaggcctgacataagttatttggaacccagtcagaccccatcacctttggcttacttaaaactttcccctccctgtgtgctgtttgtgacatagcctacttgttcctcacctcactgaccccaaacccaacacaccccacagctgctgaccataatgaaacctactggccaacatcagtcatgtaaatcagttctccccactgctcaggtctacctaatccacaaccacgctgggaaagcctgagggataaggcccatggaccgtaacaaaggcacagtcccacaggtcctctctgtctcattccccacccactggttagcacccggctgtctcctgagttgctgtcaggacctcaagggcaaccctcttctcgcggatctgtaaggaataaaatgcttctgctacttgatgtgttttgttgtgttgccttttctgtacctaacccacccaacacaccagaacacctctcctcttggtcgggacagagctagaatttacagccactctccagagacagaagcctcaggacctaattagaggaacatactaaaaggggacatgggatggacactgcaaaagggagcgttgcctgctggatacaattgcgacacggtggtcagcagtgtgggtgtgagggcattggagggtgctctgtccacgccatatgcccataacacagtccttaggataccacaaaaccctggcccagtcaccaccaccctgtggccctcctaatatggacgccacatgctcaaaggactcccactagcagaggcaccctctgcacatgtgccgactggcttgatggcttgtgtccctcatgacacagacaatgcgcatgccaggatgcatgctgctgcatgacctgtaccccaaaggtttgttcccaaaggcctccgaacgtgaacactgaagtcccaggccttgcaaacaaagtggcatccaaatttcctgtgcatagctgcccatcaccatcagtgtgagtgtgccccagaggtgtgtttgtcacagcacttccagggcagacacgaaccagtccaagcctcatagctacagtggtgtcctgactccccctacaggctgatccacccattgcagctggcctttgccttgaaacactgcttcaatcttccctaaggactatgactaactcccgcctgagtaacccagcaaacttcaccatccagtgggctacagccacactgtggccaaatactgtaatatgaccccagagatccccacctgctggcattcatacccctggataacaccctcctgttgagcgcacgcacgacctttgaccagtttctaacagaagaataagcaaaaatgaagagaatgcagatgtaattgaggtctcaagtcagttgggttttgttttgttttgtttttagacagggtctcactctggttgcccaggatggagtgcagtagcgcaatctcagctcactgcagccttcacctccctggttcaagtgattctcctgcctcagtctctcaagtggctgggattacaggcacccaccaccatgcccggctaatttttgtattttttttaatagagtcagggtttcaccatgttggccaggctggccttcaactcctgacctgaagtgatccacccaccttggcctcccaaagtgttgggattacaggcgtgagccactgcacctggcttacttttatcttgatacacatagtgtatacattactgttgctgtagggcatgtatgtgtataaacctagtatgtactgccaacagtttttgaaattggtttgccaatacactctccaaaaagcagtatatgcacatcctcagcaactttatatcagaatccccatcaatgatttcactacatgcggctagttcactggaacccctaagtgccaaacagagaaaatgtatagaatttaagtcttcacttaaagtcatcagcaggttcttggaaactgagactttaagcgaaatgacatacaacaaagcgaattttttcacatgctaattaatataagcgagttaagctcctacagcatatttctggtcacaaaaacatcactaaacttctaaataaagaccccaaacacttctaatattaaatattgaaataaatgtgaaatatatatacatttaagaaagactaataaaaataggctatttatccaatttttgatgaattggtatgtgatggcagttaacagtggtgggttaaaacaaataaatgcttccaaagcaaaaactctaaggaccacctcctaccaccaagaagctcaaaaacaataacaaatggggccagcttgctaagtggtaccatttactgttgtacagttgtatcattatcaaatgttttaggaatttttattttacaatagtttgtattcattcattcattctccaatccacctattccagttccagaatgaaaatggccagagcccatcctaacagctcagggcacacacacacatagtgggacaatttagacacaccaattaagctaacatgtgcatctttggcatgtgggaagaaaccagagtacccagagaaaacccatgcagacatgggaagaacgtgcagaatctacagagtggccctactggaatttgattttttttccgtcatcgatgttataattaacagacattattctaagatctgttgtatttccaggccatgtggccccttcacagctttttggcagcccacattggcaggtgagttttctggtcatttacttacatggattgtatcaagccaaccccctaggtgtatgagtgtctataaggagtcacgcagagtgcttactctggacattccttcagggaaacgaaggactaatttaggtaggagaaggaacccaaaagtgaattgaaaaaaacaacgagagaagttttgtctgtttatgaatatacatatttcctaagactaataattaacatcagtgaattttcatggagagcttatttttcagtgatcaagcactgattctcattaatcccttgaattaatttcttattcatgtaattaaaacacattcatgcttctcctattttcccttgatttacatcatttgtcagatatcacttactttggccaggcacagtggcttatacctgtaatcccagcattttgggaggccgaggtgggtggatcacttgaggtcaggagtctgagaccagactggccaacatgctgaaaccatctctactaaaaaaaaaaaaaatacaaaaatacaaaaattagccaggcatggtggcgcacacttgtaatcccagctactagggtggctgaggcaggaggatggcttgaaaacccaagaggtggaggttacagtgtttcagtgagccgagatcctgccactgcactggagcctggcaacagcgaaactctgtctcccaaaagatatcacttactatttcctgtcatacatttaagattaaattatcccaccacattgtttccccaaccaaagaaagaatactgactctgtcaaacctgggagtaatctttgatgcactcctctctctcaccatagaagtggagtcagccaattcacagaatgctttgcccagctcttatttccttccccttcagtatggctaaatcataccatatttttggtctcagcttgcatatcactcttttcttagcattgcctattccaaagaaaaatagagaaaataattctgtcctctactttacttacagaccttcatcaatttgtaatacacttatttgcttggttacatgacagcctcctccactagtttacaacctccctaagaacagccctaggctgaatttttttactatgccttaattaaccattcagacactcatccatttacaggatacaccaataaatgaaggatacatttaaacacggcacagaatacaatcagaactaccaaaatgtataactttctgaaagaacgagtgactgcgcaaaaagacaatataacggataaacagtgtctgctagttttaaagagactaaaagacatgaaacttggatacgtaatagatcccaaaacaatcaaaaccatatattggaacaaagtggagaactgtacctttttacacagggtacatattaacaacattttaaattttctggggtaatagtattatggttttaaaaggacatgtctttatccacaggacacgtattaccaagcatttaaaccttaagtgtcacgcctgcaatgttcaacttacttcaaagcctccattccttcttcctaaaagcccgttttgaagctctgtggggaggtacaggcctaggaagttcagataaaaagaatagctgagtattcttgcttttcttcagtagaaagacttctggtctacaaacgtttatattcacatagagaaataaccacaccccagatacctaaaaaatagctttatgtttctacctgaatgtagagtgtcaaaagtaaatacaggatgcgcaaagagaaaaacaaattctcagataaaacaggaggaagaagcccccgaaaccaactttcaccccagtactcaccgcgacgagctggactcgccaggtacgggagattggggggatgaaggaccagtcaacctgattcgaacgacgaaaactcgttgtttctggaaaaaaaaaagtcacaaagaattgctttggaagagtttgaagcggcaatcaccgtgtttgcaaaaatcgtgaggaagcgcccttacgacagatcccgaaacggctcctggcccagggccgtcgcagtgacaactcgagtggctttttgaacctggcggcgccaggaggacccgcgcggccccggcggacgcgagcggagcaggcaaggtctctctaaggaggcccctcggcggcctggggcaaaccggtactttcgccaccccttccaccgctggctcccacccgtcatccgacctcgccaaagctgtattaagcccaaacgccaccaggaagaaaacgggtttggcggcgcggagaaagcgccggaaaacacagcagcgctccgtgacgtcacttccgcctccagcctcaaacctggaggagcgctcgggaactgcaacctcagccgagctgaacaacctcaggcagagagattctggtttactccccagtggctacggagacgccttggaggccttggagtctgctcaccttgagggatggaggccaaaaggggcccagagcacaaggctgaggttagaaccagccctgcggacggggctaacctagggtggggtcggtggtgttggcaaagttagaggtgggggctcccccacaggatgtgcacaatgctcacaaaaagcttttattctcacctcctcccacgttcctagcaccctcaaaatgatgcttcctttgataatcctgccagtccatgatatggcctatctcctccattcattcaatctagttttagttttttattttgtttttgtttgagacagggtctcactgtgtagtccaggctggcgtgctgtggggcgaaactcatgggctcacgccatcatcccgcctcagcctcccgagtagctgggtctacaggcgcaggccaccatgcccggctaattttttttcccccagagttgaggtatgttacccaggctgatctcaaactcctgggctccaacaatcatcccgcctcagcctcccaaaaggctgggattacaggcgtgcaccacggcgccgggcccaattcaacttgaggccaatatttccccttatttcatttatctggacgccatgctaaattctaatagttgattcctttgtgtattcaatatgctgatactttttgtaaatgttgatttttttttctttgactaatatattgttttctgagatcttacagtgagttccagggcctcgttgtaaaataccgcgttgtaaaatagcactgatatcaggcattcacttctgcaggagtgattctagtttctccagaaatcgtttttgctgtgctttgtagtgggtggcctttatggagttaataaagttattttgaacactgttttactaacatgaagaactgttcatgtacattatcaaatattttgtgaatctactgaactggtaactattttgcagttaatttttcaactcaaaaagattttcttttttaagtttcctctcttgcattaagaagtcttcataaactctagattacatatagatttcctaattttcttctgcagcatattactttaaaaacattgaaatctttcatactcatggaatgtgtttcagtatgtggtgtgggatagtggatacaatatctctttcctccagaaacacggccaattattgtagtaccacatattgataaactgtccttgatttactgatttcaaattccatgtttattaaactataaattcctatgtatacctgtatctgattctagactctatgccagtaatacatttacttatgccaatatcaagatcataatcttttcattccagtggttttgtatcaactaataatattccgtggtaataataataataatggtagcttttttgtttgtttgtttttgagacagtcttgctctgtcacccaggctggaatacagtggtacgatctcggctcactgcaacctccacctcctgagttctagggattctcctttctcagtctcctgagtagctgggattataggcacgcgccaccacgctcagctaatttttgtatttttttttttttttttttttagtagagatggggtttcgccatgttggccagggtggtctcaaactcctaacctcaggtgatctgcccacctcagcctctgaaagtgctggtgtgagccaccgcacctggcggtagctgttttttaaatcttactaccctaaatgcttaatagacattaaatttttacgctcccaatgatgtggctattattgtgatttttcccttttggtttttagaccagctgtattgagatacaattcacatataaccaacacagttcacccacttaaagctatataattcaatattttttagtacattcgcagtgttgttcaaacataattttggaacattttaatcacactaaaagaaatctttgaatgggaaaacccatttacctcctctttaagctccagggaaccacaaacctactttatcactacagatttttcttttgtagacatttcatatggatatactcatacaatttatttttatttttgtatagacagggtctcactatgttgcaaggctgatctcgaactcctgggcttaagtagtcctgcctcggcctccaaaagtgctgggattataggcgtgagccaccatgcccggcctaaaaatcatacaatcttttgtgaataacttttttcacttagcccgtttttcaaggttcatctgtattatagcctagatcattctattttattgctgaatgatattccattctatgtatataccatatatgatttgtcttcagttgatggacatatggtttgtttccactttgggggtgttgtgattaatgctgctatgaaaattcacatatatctttttgtgcatactggcttttattttttgagaaatcacagctcactgcagcctctacctcctaggctcaagcgatcctcccacctcagcctcctgagcaactaggaccacaggcataagccaccacacccagctaatttttgtatttttttgtagagacagggttttgcccaggctggtctcaaactcctaagctcaagcaacctgcccgcctcggcctccacaaaggcataagccaccacgctcagctggtttttatttctctagagtatatatctgggaatggaattgctgagccatacagtaactatctaagaatttgaagaactgccacactgtttttgaaaggggctgtactgttttacattcccaccagaaatgtatgagggctccaacttctctacgtccctgctaacactttagtgtttttcatgttaactgtgttagtggtgtgaggtgatacctcatgattttgacttgtatttccctaacactagtgatgttcagcatcatttaatgtgctttgttagccatttgtatgcttctttggagaaatttctgttcaattcctttgccccttttaaaatttgttttctggctgggcacggtggcttgtaatcccagcaatttgggaggctgagacagacagatcacttgaggccaggagttcaagaccagcctggccaacatcgtaaaagataaaaaatcagccaggcgtgatagcacacacctgtaatcccagctactcgggaggctgaggcaggagaatcgcttgaacccgggaggaagaggttgcagtcagccaagattatgccaccgcactccagcctgggtgataaagtgagactctgtttcgaaaaaaaaaaaaaaaaaggtccgggtgcagtggctcacgcctgtaatcccagcactttgggaggccaaggcaggcagatcacctcaggttgggagttcaagaccaccctgaccaacatggagaaaccctgtctctactaaaaatacaaaaaagtagccaggcatggtggcacatgcctgtaatttcaactattcaggaggccaaggcaggagaatcgcttgaacccaggaggcggagcttgcggtgagctgagatggtgccattgcaatccagcctgggcaacaagagcgaaactctctatcttaaaaaaaaaaattccattgagttgcaagagttctttatatattctgaagagaggtccttatcatatatatgatttacaaatattttctctcaataggttttccttctctttcttgatggaatattttagaatactaaactatataatattgatgagtgtcctctgaagtacaagtttaatgttgataattttttgtttgcaatgtttttgatactgcacctaagaaaacagtactaaatccagtatcatgaaacttttctgcctatacttctgggaattattgtaggtcttacatgtatgtttaggtctttgatccattgtcagctaacttttgtggggtttttaaatattttaatttttttagcttaatccccaatgtggtatctgttaacttttgtatgtggtataaagtaaaagcccaaatgcattcttttgcagtatggtatcaatttctcccagaaccatttgttgaaaacattcttttcattcttcattgaattaccctggcagccttgtagatctgttgaccatatatgtgagggcttacttctggactctcaattctattccattaatttgtatgtttatccttaagccagtgccacattgttttgattactacaattttgtagcactttatgaaatccaaaagtgtgactccttcaactgtgttcctctttttcaagactgtttggctatttggtgttctttccatttctatataaagtttatgatgagcctgtcaatttctgctatgaagccagtgctaaattaaaaaaaaaaataacatcagtggaacttgttaaagcatagtaaggcagactttattcagtaccatcacgttaggtatagggaccactgcagtaggattttgcagtggaggtgacagagtaggctaactctgaataattatagcatgagcaaatgggaatttatagtcaagttaaagagtaaaggtcagtgagtggaaaattgccaagaggaatatcaggggtatggaggatggtggataaactgacctaacatgatgtctgatcactttggcctgtaattggtagatagtagagaatcgggaacctgatcagctataagggtgatctgatactgagggtggtaggttcttattgtactgacttagcagggttcttgctaaaactcaatatacaaaagtgtacacatgggcctaagaaaagtttaaggagcttgactatagttgagtaaagcaaagactctgtcaccatctggaattttgatagggattatgtttaatctatagaccaacttggagagtactgccatcttaaaaataatgttcagtattcttggtcaggtgtggtggttcatgactacaatcccagcactttgagaagccgagatgggcagatcacttgaggtcaggagttcgagaccagcctagccaacatggtgaaaccccatatctactaaaaatacaaaaattagttgggcatggtggcacatgcctgtaatcccagctactcgggagactgaggcaggagaactgcttgaacccagaggcagaggttacagtaagccgagattgcaccagtgcattccagcttgggcaacagagtaagactccctctcaaaaataataagtattctaatccatcaacatggggtgactttccattacttttcatctttatcaacattttgtggtattcagtatggaagtctcgcacatcttttatcagatttattcccaagtagtttattattttaatactataataaatggaattgttttcttttcttttcttttcttttcttttttttttttttttttggagatgaagtttcgctcttattgcccaggctggagtgcagtggtgccatctcagctcactgcaacctccacctcctgggttcaagcgattcttctgcctcagcctcctgagtagctgggactaccggcacgcgccaccacacccagctaatttttttttttgtatttttagtagagacggggtttcaccatgttggccaggctggtctcgagctcctgacctcaggcctcccaaagtgctgggattacaggcatgagccaccacgcccagccagaattgttttcttaatttcatttttggcttgtgccgtgatagtatacataaatacaactgagttttctatgttgatcttgttacctgtaaccttgttgaacttgtttatcagttttaatagtttagtggattccttaggatttcctacataaaaaatcacatcagtagataaacttctccattccattctggattcattttcctttccttgctcacttactttttaaattccaaatggatatggaatttttcatcttccctcacaatactttcctctctctcaaatgtagtatagtaattagttgtgttgaaaacattcctgataataagccattcttgcaatcctaaagtaaaactgttcatagggcactattttttctcataactggattagttttgctagaaattttatttagaagatttgcatacagatgagttttctttaaaatatcattacctaggactaatttaatcttactaagtaccactaaatcttgtcttatcatatttgagtagatgcattcacttatttgattcttacagtaccaaatcaggcagcttattataaaattcatccacagtttacagaagatcagactgagatggccaggcgtggtggctcacgcctgtaatcccagcactttgggaggccgaggcagacagatcacgaggtcaggagatcgagaccatcctggctaacacggtgaaaccccgtctctactaaaaatacaaaaaattagccgggcacggtggcgggcgccgtagtcccagctactcaggaggctgaggcaggagaatggcgcgaacccgggaggcggagcttgcagtgagccaagatcagccactgcaccccagcctgggcaaaagagccagactctgtctcaaaaaaaaaaaaaaggaagatcagactgaggcaagagaggccatttaacttctacaaaattacgtagccagcaagaggcagagccaagacgtgtactctagcagtctgactctattctgtacttcactttgctctataaccagtacagctttaaaagtttcctcaccttttcaaatgtgttgacctctgtgaaatgctctgagatatttcttttcttttctttttttttttttttttttgagacagagtctactccatcaccaaagctggagtggcacaatttcagctcaatgcaacctccgcctcctgggttcaagtgattactgtgcctcagcctcccaagtaactggaattacaggcgtgcatcaccatgcagggctaatttttgtatttttagtggagacagggtttcaccatgttgcccaggctggtctctaactcctgaactcaaagtgatccgcttgcctcagcctcccaatgtgctgggattatagacataagccaccatacctggcctgagatatttattttcatgcccacctggctgaaattagtatatatttggaggaccaactccccttacctaaaattaatgtttcagtatttcaacccctatccttttctcttgttttctcttcattaagagaaaagtctcagccacatgtgtggctcacgcctgtaatcccatcactttgggaggccaaggcaggtggatcacgaggtcaggagatcgagaccatcctggctaacacggtgaaaccccgtctctactaaaaatacaaaaaattagccgggtgtggtggcacacgcctgtaatcccagctacttgggaagctgaggcaggagaatcgcgtgaacccaggaggtggaggctgcagtgagctgagactgtgccactgcactccagcctgggcaacagggcgagactctcaaaaaaaaaaaaaaaaaggagatataagtcccttaaggaggccaggcgcagtggctcatgcctgtaatcccagcactttgggaggctgaggcaggcagatcacaaggtcaggagatcgagaccatcctggctaagacggtgaaaccccatctctactaaaaatacaaaaaaaaacttagtcgggcgtgttggtgggtgcctgtagtcccagctactcggaaggctgaggcaggagaatggtgtgaacccgggaggcagagcttgcagtgagccgagattgcgccactgaactccagcctgggagacagaacaagactccgtctcaaaaaaaaaaaaaaaaaaaaaaaagtcccttaaggagaccacaaggatatgaaagaggcatgtgaatccaggcctacgcacagttccactacatgaatacatggaagccattccacattttgaatcaccatgcacacacacagagaaacgcgcagaatcaccatgcacacacacagagaaacgcgcacacacacacagttcctgtgcgtgcagatggtgtgacctgggagcttgagcagctggctgcacgcaggtaacaaacaaactaagagggcagaagtctaagaaagtatttcacatagccatccaaagaaactttaaggtgttccttttctctcagcccttaaaaaatgtcatttaatttgctctttgcctttatggtggtgtgtttttttgtttttttgttttttgttttttgagacagaggctcactctgtcacccaggctggagtgcagtggcgtgatctcggctcactgtaacctccacctcccaggttcaagtgattcttgtgcccagcctccccagtagctagtattatagatgtgtgccaccacgcccagctcatttttgtatttttagtagagacagggttttgccatattggccaggctggtcttgaattcctgacttcaagtgatctgcccacctcagcctccaaaagtgctgggattacagatgtgagccattggtgggtttttttgcttgttgttttgagacagggtcttgctgtcacccaggctggatgacagtgatgtaatcatagctcactgcagccttgaactccagggctcaagtgatccaccttggcctcccaaagtgctggcattacagggcatgagtaaccatgcccaggcctttatagtttctataagaaatccacagtcggccaggagtggtggctcatgcctataatcccaggccaaggcggattgattatgaggccaggagttcgagaccagcctggcgaacatagtgaaaccctgtctttactaaaaatacaaaaaattatatgggtgcggtggcaggcacctgaatcccagctactcggggggctgaggcaggagaatcgcttgaatccgggaggtggaggttgcagtgaaccgagattgtgctattgcactgcagcctggagtgtgagactccatctcagaaagaaagaaagagagaagggggggagaagaaagaaagaaacaaagagaaaagaacgaggaaagaaaaagaaagagaagaaggaagggaagaaaggaaagagaaaagaaaaaaaaaaaggaaggagaaggaagggagaaaggaaggaaggaaaaaagaaagaagagaagagagagggaaaggaggaaaggaaaggaggggaaagaagggagggaaggaaaaagaaatccacagtcaactgaactgttcttttatttatttactttgagacagggtctcaaagtactacaggcacatgcaaccacacccagctaatttttttgtaggggtgggatttttccatgttgcctagacgggtctcgaactcctgggctcaagtgatctgcctgccttaccctcccaaagtattgttgggatttataggcatgagccacgaaatgttctcttataagtaacatgttattacttcccaggctaatttcaagatgttctacttatctttagctttcacaactttaattattatatgttttggcttatatttctttggggttatgttttgggttcattaaatttcttgaatctgaatatttgtgtctttcatcaaatttgagaagtttttcatcattaccttttcaaaaacttactgcatcacacatcttcttcttcttttaggactctaatatcatgaatgttagccttttgtactgttacacagccctgtgaggctctgctgctagtatgctgaatagtttgggtttatattcagggcactttgaatattataacactctgggcctttaagtcctatggagaacgtagattttttttttttttttttggatggagtctagctctgtcgccaggctggagtgcagtggtgtgatcgtggctcactgcaacctccgcctcccgattcaaccgattctcctgcctcagcctccttagtagctgggattacaggcatgtactgccacgcccagctgatttttgtatttttagtagagacggggtttgaccatgttggccaggatggtctcgatctcttgacctcgtggtccactcgcctcggcctcccaaagtgcagggattaaaggcatgagccactgcactcagctgatttttttttttaatctggacaattacccagttgggttcagcttgcaagttttagtcaacgctctgagttgtggtttcaatgagagctttattttcaaagattttgttgtatgctttgtgtctctacctggaggctagactacacagaaggtcatctatctcacattccagctctcaaagtctatggtatgtctcattgccaccacaggattgcttggaggctggaaccaagtaaatggagaaaacaaactgaggtattaatctccctctctttctcactgagcattagaaaccacccctcccacccccttgttgatattaccagaaccagagggcttcttctggaactctccatgttggtcatgatgtgtgcctctggtttttcagccacactgagtacagaccagatgaaaccagaaggggtaaaactagtaaacttactgcctgcttggtggtactttgaacgctgatttttttttccatctccctgctgctatttacttttcagattcttcaaatagctgatgcattctgtccaggtgggacattcagtgggacagacaggataactgcatttactccacctttccctaaaccagaaccaattttgccaagtcatacacacacacacacacacacacacacacacacacacacacacataaaatataggatgcattctcttgttacttctggtttctttcacaacatcatgtttgtgagattcatccacgttagggggtttacctgtatagtaggcagaattctgagatggtgcttatgagtcctgcactctggtatgccttggtataatcccctcctgttgagtgttggtaggataaacagtttcctcctaatcaagaaaatatagcaaaagtgatgcaatgtcagtcaactgtattacattatgtggcaacaatgaaggaattttccagatacaattcaagtccctattcagtcgattacacattacacaaagcgaataatctcctagaatattcctaggagaacttgatttacttatagtatagagatatctagagatattcacctgacaaaattagatgagtcccttcaaaggggatttggatatcagtgactaaaaaatagcagacagctggatgccatggctcacacttgcactttgggaggccgaggtgggcagatcacaaggtcaggagttcgagaccagcctggccaatatggtgaaaccccatctctagataaaaatacaaaaattagctgggcatggtggcgcgtgcctatagtcccagctactcgagaggctgaggcaggagaatcgcttgaacctgggaggcggaggttgcagtgggccaagatcacgccactgcattccagccagggcaacagagcgagactccgtcacaaaaaaaaaaaaaaaaaaaatagacatactctctgttgctggcattgacaaaataagctgtaaggaattctacagccataacaaaattaattctaccaacaatctgacacagattagaagcacattcttctatattttagccccaaccctctccagatgagaaggaaactgtaagaattctgccaccatgaaaaagctgaatgttgtgacaccaccaaagggtcactctcactctacagcaatggtccctttccaaaatggaggcacagagatgacaggtggagaattcaaagcttggcctacagggaagctcagctagatccaagacaagattgaaaatcaacacaaacataaagcaatcaacaaaataagaaataaacatcttaagaagtaattaatcaaagctacaggaactgaaaacctcacttaaggaattttaaaataaaattgaaagcttcatcaacagactacaccaagcagaagaatttcagagcttgaagactggtctttcaactaacccagtcagacaaacacaaagaaaaaaatgtaaggaacaaagtccccaagaaatatgggatgatgtaaagtgatcaaatttacaaataactggcattccagggagagaaagagaaaaagtaagcaacctggaaaccatacttgagagaataatttaagaaaatttccctaattgtgctagagaggtagccatccatatgtaagaaatccagacaacacctgccagatactacataaaatgaacaccacgaagacatacagtcaccagcctaaggtcaacgctagagaaaaaagcttaaaggcagctagaggaaatggcacatcaggtacaaagggaatctcgtcatcaggctaatagcagactcctcaggagaaaccctacaagccagaaaagactgggggcctattttcatcattcttgaagaggaaactcaaaccaagaatttcaaacctgaccaaactaagcttcataagagtagaataaacatttctagagacaagcaatcactaagggatttcattaccagtagaccagccttacaataaatccttaatggagtttttgtgtgtgcgtgtggcggggggtttgtttgtttgtttttcagacatttcactcttgttgcccaggctggagtgcaatgacacgatcttggctcatggtaacctctgcctcctgggttcaagtgattctcctgcctcagcctccggagtagctgggattacaggcatgcaccaccatgcctggcttttttttttttttttttttagtggagacagggtttctccatgttggtcaggctggtcttgaactcctgacctgaggtgtccaccctcctcagcctcccaaagtgctgagattacaagcatgagccacctcacttggccccttaacggagttctaaacatgaagacgaaagaatgatacctgctaccacaaaacaaccaaacctaagtacgcagcccacagaccttttgaagcaaaaacaaaatagaaactataaaacaaccacctaacagcttcataataggatcagatcctcacatatcaatattagccttgaatgtaaatggtcttaccaccccatttaaaagggacagagtggcaatctggataaaaacgacaagtactatccttctgagacctatctcacacatatgagacacccatggactcaaaaagtgggagaaagagctatcatgcaaatgcaaaacaaaaaagagcacggatcattattcttttgttggataaaatagactttaaaccaacaacaggaaaaaaggacaaagagcactatataatgataaagggttcaatccaacaagatgacttaaccttcaacattggagcattcgcattcataaaacaagtacttctagacctacaaacagacagccaaacaagaatagtggcagacttcaacaccccactggcagtgttagatcactgaggcagaaaactaacaaattctggacttcaatttgaaacttcaccaattggacttaatagatatccacagaacattctacccatcaaccacaaaatacatattcttctcgtctgcacacagaacactcaaagaccacattctcagccataaagcaagtctcaataaattcattcaaaatttgaaaatcataccaaccatactctcagaccacagtgaaatagaaataaaaataaagatcaataccaagatctgtcaaaatcacacaattacatggaaattgaacaacttgcttctgaatgacttttgggtaaacagctaaattaaggtggaaatttaaaaattctttgaaattaatgaaggcaaaaaaacaagataccaaaatctctgggatgcagctaaagcagggttaagagaaatgtttagagtgctaaaacacctacagcaaaaacttagaaagtcagcaccatatgaagtgaaaaaaacaaaaaaggaacatacctcaaaataatagagccatctatgacatagctgcagccaacatcatactaaatgggcaaaagctggaagcaccccacttaagaactgaaaaggctgggcacagtggctcatgcctgtaatcccagcactttggaaagtcaaggtgggtggatcacctgaggtgaggagttcgagaccatcctggctaacatggtgaaacctcgtttctgctcaaagtccaaaaattagccaggtgtgccagtctgtgcctgtaatcccagttacttgggaggctgaggcaggagaatcacttgaacccaggaggcggaggttgcagtgagccaagattgcgccattgcactgcactccagcttggacaacaagagcaaaactctgtctcaaaaaaaaaaaaaaaaaaaaaaaacaactgaaaaaaggccaggcacgatggcttgtgcccgtaatcccagcactttgggacactgaggcagctggatcatgaggtcaggagttcaagactagcctggccaagatggcgaaaccctgtctctattaaaaatacaaaaattagctggacgcagtggcaggcgcctgtaatctcaactactcggaaggctgaggcaggagaatcatttgaacccgggaggcggaggttgcagtgagccgagatcgcgctattgcactccagcctgggtgatagggcaagactttgtctcaaaaaaaaaaactgaaaaaagaaaaggatgcgcactctaaccactgctattcaacatagtactaggagtcccagccagaacaatcaaagaaataaaaggcacgcaaataggactatttgtcttcactgatgatatgagtctgtacatagaaaactctataagactctgacaaaaggcccctggagctgataaacaacttcagaatttagaaaactcaattcagttctggatacaaaatcaatgtataaaaatcagcatttatttgtttgtttatttatttttaaagatacagtctcgctgttgcccaggctggagtgcagtggcacgatctcggctcactgcaacctctgcacatcagcctcccgagtatctgggattacaggcatgcagcaccatatccagataatttttatatttttagtagagacagggtttcaccatgttgcccaggctggtcttgaacccctgcctccaagtgaccagtctgcctcagcctcccaaagtgctgggattacaggcatgagccaccacaccaaatcaccatttctgtacaccaatagtgttcaagctgagagccaaatcaagatgcaatctcatttacaataaccacaaaataaaatacctaggaatacatctaaccaaggaggttaaagtttctgcaagaagaactacaaaacaacactgctgaaaaacaatggaaaaacaccccatggtcatggacaggaagaatcagtatcattaaaatggccatagtgcctaaagcaatctgcagattcaacactattcctatcaaactctcaatgtcatttttcaaagaattagaaaaaaaaactattctaaaatttatacagaactgaaaaagagcccaaatagccaaagcaatcctatgcaaaaagaacaaaaccagagacgtcaccctacctgattccaaactacactacaagcctacagtaaccaaaatagcatggtactgttacaaaaacagacacatacaccaatggatcaaggttaaaaaataaaagaagccacatacctacaaccatctgatctacaaagtagacaataacaagcaatagagaaagaattcccaactcaataaatggtactgggaataactggctagccatatgcagaagaataaaactggatccctacctttcaccatatacaaaaattcaggatggattaaagacttaaatgtaaaacctaaaactgtaacaatccttgaagaaaacttaggaaataccattctgggtatcagccttagcaaagaatctgtgaataagtccccaaaagcaactgcaataaaaacaaaaattgataagtaggacctaatttaactaaatagcttctgtacagcaaaagaaactatcaagagagttagacaacctacaaaagaaaatattttcaaattatgcatctgacaaaggtctaatatccagaatctataagaaacttaattcaacaagcaaaaaacaaatcccattaaaaaatgggcaaatggtttggcgcagtgtctcacacctgtaaccccagcactttgggaggtcaagtaaggaggataacttgagttcaggagttcgagaccagcctggccagcatggtgaaacccccatctctaccaaaaatacaaaaattagctgggcatggtggcgaacatctgtaatcccagctactcatgaggctgaggcaggagaatcgcttgaatccaagaggcggaggttgcagtgagctgagattgtgccactgcgctccagcctgggtgacacagtgagactccatgtaagccaaaaaaaaaagtggggggcagggcaaaagaacataaacaggcagttctcaaaagaagacatacatgcagccaataaacataggaaaaaatgctcattactaatcattagagaaatgcaaatcaaaaccacaatgagataccatctcaaaccagtcataatggctactatttaaaagtcaaaaaacatgttggccaggatgcagagaaaagggaacatttgtatacactgttggttggaatgtactgtggaaaggagtgtggagacttctcaaaagaacttataacaaagctaccactctaaccagcaatgccattaccgggtatatacccaaaagaaaatagatttttctatcaaatagacacatacactcatatattcatcacagcaatattcacaatggcaaagacatggaatcaacctaaatgccaatcaacagtggaatggataaagaaaacgtagtacatatacaccatggaatactacgcagccataaaaaagaacaagatcatatccactgcagcaacatggttgaagttggaggtgatcatcctaaacagattaacacaggaacagaaacctaaatactacatgttctcatttgtgagagctaagcgagtaatcatggatacaacgatgggaacaatagacactggagactactgggcgggtaggtgggaggctgggggaagaggagagagttgaaaaactacctacaggatactatgcttaccacttgggtgatggatcattcatatcacaaaccccagcaatacacaatttacccatgttacaaacatgcacatgtatgccctgaacctaaaggtgagaaaaaataatgtactacaatggaagcaaaaattaaaaatagaaactaacaaaatagaacactatagactgaactgtgtatacactcttccccgcacaatgttcatatcttcgaatcccaactcctaaggtgtttatatttgaatatgggggcttctagaggtaattagggttggatgagatcatgatgatggggctctcatgatagtattagtaccttataaagaagagacacaagagtgtttgctgtatctgtcagccaaaggtgagccagcagaatgagagataatgagaaagcagcactctacaagccaagaagatgccctcaccaaaaaccaaccatgttggcaccctgaagacatttacagcctccatagcactgagaaaattaatttctgttgcttaagccatcctgtgataatttgttatgtcaacacaacttttctacagaaatcaaaccaaaaatatactaatcaaatccatttattttgaaaggaattaacaaaactaagtaaattctagcaacattaatgtttttcataaaggagaaaaggcacaaggaaatgatatcaggaatgaaaaggggtatgcaaaaggtatgcaacagcaaaaggcacaaatacttaaaatatcagaaaatataaacattgagtataaattttaaaatacaaaactacctataaaaacaactcttgccaaaacagacttaagatgaaattggaaaataataaataaaaactttaaaaagatgaaattggaaaccttactagtgcctacaaaatataaaaataattgagtccatgctttgaattcattccaaaacatgaaaataaaatcccataacaatggcaacaaataatccagattcagctgattctgccagtgaattgtgactgataatacttgtaataagaaagtactgtatgagttaaggaaaggagaaaatactccaaccttcatacaaaaaaacaggcaatgatagactaagaaaagaatattgcttggaacaggccccaagcctggacataaacaggccatgagaaactggccataaacaagatctctgcagcactgtgacatgctcgtgatggctatgatgcacacactggaggttgctggttcaccagaataagctcaaggaacacctagcccacccagggcggaaaacttctcaaggcattcctaaaccacaaacaatggcatgagcaatctgtgccttaaggacatgttcctgctgcagataacaagcaagagcctgtcccttggttctccataaataatacattcagttaatctataaactgcagaaacgatgtttatcatgagtttactgtcaataaatagttgggtcaaactctgtttgagaccgtcagctctgaaggtctcattgcacttctgatcccacattgcactctctttttgtgtctgtgtctttattcctctagcaccgctgggttgaggtctccatgaccaagctggtctcagcaagtggcgcccaaacatggggctcgaacccgggtcgaagggtcgccagagcgatggttggagaacatggaactacgctggagcacacctgagtactcttaagcaatccccatggtaagtaagaaggggagctcggaagcatcagggtaacaatgggacaagggtcaagcaggcacaaggcttatttgagtctgcctcggcagctcctcagaaaaggaggagtgaaagttagcactagctgacttatgcagctttttagtatggtagagaaatattgcccctggtttccgactgaggaaatatggatgtagaggtctgggaggaggtaggcagcgcactgaaaaaggcgtataaggatggtgctgaggatattcctataactgtctggtcagtgtgggctctgattcattccaccttggaagcttttcacactgatgatgaggaggaaggagacaaagaagagagggagtgtgataatgttgcagaagagataaaagaacagatccgtcaaccacttaaagagacccaagaaggggaagcttgtccctgcccctcagcacctcctcaataccttgaagatagggaatggcctgaccctctggatctttcttttctggaggacactgagcaaaaagtagtctccccagcaactgttcgagcagagccccgagtgaccgccctcagttctattcaggcaggaattcagcaagctagaagagagggtaatttagaggcttggaagttccctgttaggatacaccccccagatcaacaggggaatgttatggctacatttgaggcttttccctttaaattactgaatgagtttaaacaggctatcaatcagtatggaccacgttctcctttcgtgatgggtctgtcaaaaaatgttgctacctccagtcagatgattcccattgatgggacactcttactcgagcctgtctggctcctgctcagtttttacagtttaagacctggtggccagatgaagcttctattcaagctgcctgcagtgcacaaattcaacctccaattaatgtaactaccgaccaacttttgagagttggtggctgggctgcattagacgcacaagtggtcatgcaggatgatgttatagatcagcttagaggagtgtgcattagagcttgggaaaaaaatctcttcaggtggagaacaatacccttattttagtgctgttaagcaggggccaaaagaaccctatgcagattttatagcttggttacaggagtctcttaaaaaggtgattgcagattcaactgctcaggatatagtgttgcagttattagcttttgacaatgctaatcccaagtgccaggctgctctgtgacctgttagagggaaagcacatttagttgattatatcaaggcctgtgacagtattggaggtaatctgcataaagctactctgttaatgcaagccatgggaggactgagagtgggtaaaggaaatgctccatttcctgaagcttgtttcaactgcaggaaacatgggcatacgagagagaatgtagaaaaaatcagagggtccaactacccattgatggaaaaaagaaaactgctgaaccaggtctatacctgaagtgtaaaaaaggaaagcactgggccaatcagtgtcattctaaatttgataaagacggaaacccgatttcgagaaacgccatgaggggccaatcctgagccacattccaaaccagggcattcctggctcagaccactccctcacccctgtataatgcttgtcccccgccacagctggtagtgcctcagtagatctgtgttgcaccagggctgtgagtctcctgcctggaaagccactgcagaaggtaccaacaggagtctgcggacctctgccagcaggaatggtaggactacttctgggaagatctagtttaaatttaaaaggagtgcaggttcatacaggagtaattgatttggattgtaacggggaaattcaaatcgttatatctacctctgttccttaaaaggcagaaccgggagagcgtatagggcagcttctgattttaccgtatgtgggactaggaaaaagtgaaactaaaagaacaaggggatttggcagtacaaataaacaagggagagccacctactgggtaaatcaaattactgataaccatcctacctgtgaaaaaactattcagcgaaagaaatttaaaggtttggtagatacaggagtggacatttcaatcatatctctacatcactggccgtctgcatggccaattcagcctgctcaatttaacatagttggagttgataaagcccctgaagtatatcaaagtagttatactttgcattgtaaagggcccgatggacaacctgggactattcaaccaattataacttctatacctataaatttatgggggctctccccccatacatttattacaacaatggggagcacaagttctaattcctgagcaattatacagccctcaaagtcaacatatgatgcatgaaatggggtatgtccatggtatggaactaggaaaaaatttgcaaggtttgaaggaatctcttcaagcggaaagacaaagttcccgccaagacttaggataccatttttgatggtaagcctgcagagcctatcctgttaaaatggctgacagacaggccaatatggatagaacagtggccgctgagtaaagagaaactggaggctttaaatgaactagtcaaagaacagcttcaaaaggaacatatagctcaaactctctccccttggaattccccagttttcgtaattaagacaaaaccaggtaaatggagaatgttaactgacttaagggctattaattcagctatataacctattggggcattacagccaggactgccttctcctgctatgattccaaaaaattggcctttaatagccatagatttaaaagacttgtttctttactatccccttagctcagcaggactgtgaacagtttgcaattacgattcctgtggtaaacaacttgcaggctgctaagcgttttaattggaaagtgttgcacaaggcatgttaaacagtccaacaatttgccagacttatgtagggcaagcaattgaacctactcataaaagattttcacagtgttacattattcatcatatggatgatattctttgtgcttcccccactccggaaatattactccaatgttacggtcacttggagaattcaatttctcatgccagtttaattatagctcctgacgcaattcagactactactccttacgtctacttgggggccttagtaaatgtcaccacaataatgccacagaaagtagccatatgtaggatcaatagaaaacattgaatcagactttcaaaatttactagggtatattaattggataccgcctgctctaggcattctgacttatgccatgagtactctgttttctatctttagaggagatcctagtgtcacaagcccttggcaattaacaaaagaagctgaggcagagctgcagctaattgaaaagcaagtccataaggcccaaataaatagaatagatctagagaatactctagatttgctcatttttccaactcagcattcacctactggtgttattgttcaagagcgagatcttgtggcgtagcttttccttccatatactaattcacggactttgactccttatttggatcgaattgctactatgataggaaatgggagaactcggattgttaaattacacggatatgatcctggaaaaattattatccctctcacaaagacacaaatacagcaagcttttataaatagtcttacttgttaaacccatttagctgactttgtgggtattctcaataaccattttcctaacatgaaactgtttcaattttttgaaattaactaattggattctccctaaaatgactaaatcaaaccaattgaaggtactgagaatgtcttcgcagatgggtctagtaatggtaaagcctcttattctggattgaaaggtaaagtttttcagacgccctatacttcagctcaaaaagcggagcttgaggctgtaattgaggcattgactgcttttaatatgcctattaatatgatttctgattcttcatatgtggttctacacagttagttgaaaatgctcagctacaattccacacataagagcaactgatgactttatttacccaattgcaaacagcagttaggagtagaatgcaccctttttacatcactcacattagggctcatacacctcttccaggacctttgactgtagggaatcaaatggctgatcacctagttgctactgcaatatctaatgctagacaattccacaatttaacacacgttaatgtctctggtctcagacacagatacagcattacctggaaagaagctaaagctattaaccagcgatgcccaacttgccaaatgattccttgaggattggaacctaattctctttggcaaatggatgtcacacatgttccctcgtttgggagactagcttatgtacatgtatgtgtagacaccttttctcactttgtctgggctacatgccaatcaggagagtcttctgcctgtgttaaacatcaccttttgcagtgttttgtggtgatgggcattccagcttctattaaaacagataatgccccaagctatactagccaagctctagctacatttttctctatatggaatattgaagacattactggtatcccatataattctcaaggacaagctatagtggaaagaatgaatctctccctaaaacagcagttgcaaaaacagaaagggggagacagtgactataggactccacacatgcaactaaatctagcattattaactttaaattttttgagcctgcctaaaggccgattgttatcagcagctgaaaaacatttacagaagacagctgcaaaggcagaagtggaacaatgggtttggtggaaaggacccaataacaaaagattgggaaacaggtaaaataataacatggggcagaggttatgcttgtgtttctaaaggactgaatcaacagccaatttgggtgccattgagacatctaaagccctactatgttggggtgatcagactgaacactaggccatgggggctacgaagtatggcagagtcaaaggaatgagacaagttaagagttcatagggtgggtccagggggccaacactagtatggaggctgcgaagtccctgagctctgggagcccacactatttattggtgatcaaagaagcaggtggtgaggacgtgtggacatgggggtagacaggtgaggatgtgggggtagaaaggtagctgtgatggtttagcatatgctctgctacttgagataatggagaataggttcttctaactcaagatacaatcaatttatgagccacaaggggttttatgccctgggcttagactgtagtgcagcggggcagccttccatccttaggcacagagcttggtgttccataggccacaaggggttttagacccgggacccaggacatgttccaagactcttttacattatgtcagacaagcaggccctgcctcagcccttctaccgacacagaaagtggaacaacgggtttggtggaaagacccgataacaaaaggttgtgaaacaggtaaaataataacatggggcagaggttatgcttgtgtttctccaggacagaatcaacagccaatttgggtgccatcgagatatctaaagccctactatgagccagataacgaggaagaggttttgggaggatcccaaacacccactggtggcagcattgtccaagttgatgctgaggatgacccccaactgtcacgagcaacactcatcgaaagcagccacctacctggggacagatcaagaagctgtcacagatggtggaagaaaacctgaggaaagcaggacaagcagtcacagtgagtaattttatgacagcggtgatcaccattgccatgagtattccttcagcaaggactgacaaaaagagcaattatactcattgggcatatttaccttttccaccacttctatggcctgtaacttggctggaccccccagtggaggtatacactaataatagctcttggatgcctggtcctacagatgatagaggcccatctcacccacacagggaaggaactgttatgagtatttctttaggatttaagcatccgcccatctgtttgggaaaggccactagttgcccaccccctcagtatcaatcttggctggcaataatgcctggacgtaatcactctatggcagttacacatgctttctggtgtcagtatttaccataatgaatctgctcctctaattgaggcataccgccctcaaaaacctatttgtaaacaggattggacccggtcagaaaaaatgaatgtactcatttgggaagattgcattgcaggacaggcagaggtgctgcatgattcctatggaatcattattgattggtcccctaaggggatgtttagcatgaattgcacctctgtctgcatgtgatggccacactatgttcagctggtctgaataaaacgatcagatggtaaaaatgataagaagtaccgcaagagttcctattatctggaaacatgacggtatagtggcacctcaacctcaaatgatatggcccgctgtaggagctaaacataaggatttgtggaaactattaatagcttttgataagatcaagatttgggaaggaaaatatactatgccatcacaatataatcctaattacattttagaacttgttgaaaataatacaatttggatacaaagttgtgttcaccctccttttgttggtaatgggcgatctaaagtttgacacccctaattatcatgtaacttgccaggaaggtagattgtcctcttgtgtgaactcttccttgtttaatactaatcattctatactagcagtgagagctcaagaaggagttggttaccggcgaagctttcccatccttgggaaccctctccctctgtacatattattactaaattcttcagaaaattctaagaagttctcagtgtttcattgctactttaatcttgattattatgggactgattgctgtcacagctactgctgcagtagctggagtggcactacattcatcagtgcagacagcagattttgtaaataatggcaaaagaattctactctgctgtggaactctcaaactaaaatagaccaaaagatagttaatcaaatcaatgatctccaaccaactgtaatgtgggtgggagatcaagtagctagtttggaatatggaatgcagctgaaatgcgactggaatacttctgacttttgtatcactcctcacccttataatgaattagaccatgaatgggaaagaataaaaaaaagtatctggaaggacactctacaaacttgtcttcggatgttgcaaaattaagagaacaaatatttcaagcatcccaggcacacctgaccttaatgccaggaactggagtgcttgaaggagttgcagatggattggcagccataaatcctatgaaatgcataaaaacacttggaggctctgtgatttctatgatggttgtgctattaatctgtgttgtttgtctttgtgtagtctgcagatgcggatcctgactcctgcaagaagtagctcactgtgataaagccgcctttgcttttattgccctggtaaaacaaaaagggggacatgctgggaataggccccaagcctggccataaacaagccataagaaaagtcataaacaagatctctgcagcactgtgacatgctcgtgatggttatgatgcacacactggaggttgctggttcaccagaatgagggcaaggaacacctggcccacccagggcggaaaactgctcaaggtgttcctaaaccacaaacaatggcataagcaatctgtgccttaatgacatgctcctgctgcagataacaagccagagcctgtccctttgttctccttaaagaatactttcagttaatctacaaactacagaaacgatgtttatcacaggctgtcaataaataggtgggtcaaactctgttcgaggctctcagctctgaaggctgttagccccctgatcccactttgcactctatttctgtctatgtctttattcctctagtgctgctggattgtggtctccatgaccgacctggtcttggcaaatattacatgccaatgttaataatatttttaaaaaatctttacactataggtatataaaatattctagcaaaaaaaaaagttaatccattatactcaaactgcatttttctggaattacaaagataatataacattggaatgtcaatcagttatctttccacattttaaaaaaacttttatttacttacacatttaaatattaggtatctatcaagggcaagtacagtcagtcctaggtacctgaattttctgagtaaggcaagatcatcaaagaggaatcagggaaaagcattcaataaattcttaagccattcatgggaaagattccctaagcaatgaaaagtagaaaaaaaccttgaccttttaaaaatctacagcaaccaatacagtgattagtaatgatggaaaacatctgccattaggattagaaataaaagtatgcttgttttactacttctagttattattctagtattttctgcctagacaagacataaatgactgaaggttacaagttaagtcagttacagataatatgaaatgtggaaaacccaaaatacataaaactaggatgttaaagaatgttgaacaaggcttctagtaaaattcagtatacaaagatcaagtgattttatataaacaatcagaaatcagcttctaaaaaaaataaaaaaggaaatcagcttctgaagctaggcaatttctaggctgtgagactagggtatcatttcttagtgatacatcactattagtccaagcaccaggatgaggccaacctacagtattgacctcacctgtgacccacaagtgctcatactccaacaactgtgaaaaagtttcaggaataacctataggttttatttgagacaatcaggatggcatctaaggacagtctgtgaggtgacagaagtcacacaaggcaattaagactaatctgcgtcttttgtgtcactggtaacagttaaacgcaacaaagatgggttaaaataatcacactcataccacaagagaaccactctgaaaccctttcctctccataagaaaacatgtaacatgaaaatgcatggacctcaattcagtttttttggttttgttttgtttttgagacaaggcctctgtcacccaggttggagtccaatggcacgatctgagctcactgcagccatgacctccctggggtcagtgagacacctatctcagcctcctgagtaggttggactacaggcacgtgccatcacaccaggctaatctttacattttttgtagagatagggttttgccatgttgcccgggctggtcttgaactcctgagcccaagtgatccgcctgacttggcctcccgaagtgctgggattacaggcataagctattacacccagctgattcaggattggtaaacttacctgaagctttggattaccattacactggctggattaagaaccacagaaagaatcaccaagaaacaacagccttaattgctgtacatgatataacagaaatatttaaatttgtaccactcagactggaacctggttatgcagcttgtgcgtgtgtgtgtattccagggccatgttcaggaagtgctagtgatggtgtcaagcacagcagaatatcatgatcatccatgttcacaggagtttttctgttttcatagcacatgggcaaaatgaaaccccagaaataggtcatactgccaatcatagcagttaactgagtcaggcatatatgactgctttgccaaacagtggcatcaaagacaacattcgtggttcccaccacctctctgcactgcctgatagtacaagagttcccacctctccaggtgaagggttatgggtgtccctccacggccatgaaatcacggtatcttaagttactatctgttagtgcaccctttctccactcagacccttcttcaaccctgaccatttatctgaaaagatcaggtttgaaaagaggaacaagagtatttttacattttaaagctgtattataacttttaccttggccagtgtgagccactacaggtggaccatgtctaaaaatatgacaaaccaaaaagagaatctacactgttaaaacaggattgtctgaatcctgaaggcccactttaggtcagttgtaacccagaggatgtatagcaactagagtggtgttgctataggagaaagacataccatgccaggaatgagcagcggggtgtaagaaacttccaaaatagttctatagaaccacccagaaagccaggctttgacaggtttcagagaagcaatcctgatattccatacatgcccagtttctcataagtgtgaatgcccctcatattcactaaaggacgaagaatataaaaaattactttccaacatttattaccttcatgaagtttttctccactataaaattacaggtaaacaccaaagtatttggcaagaataaaacttctgaacatatcttacatcaaacatcttacataaaaagggtttatctccattccaagaacccaaggaaacagtgaaagctattgattttttttttttttttttttgagatggagtctcgctcagtcgccaggctggagtgcagtggcatgatcttggctaactgtaacctctgcctccctggttgaagcgactctcctgcctcaggctcttgagtagctgggattacaggggtgtaccaccatgcccagctaatttttgtatttttagtagagacagggtttcaccatgttggcctggatggcctggatagtctcgatctcttgacctcgtgatccacctgcctcagccttccaaagtgctgagattataggcatgagccactgcgcctggccagctctctatgtttctaacattgtacagcttcaggatgaactcttacacagtgtattgtcagcagattccaacggttctcccacatgcctttaactttatggagcatcatcagagtgtaagttctttcctatctttgaagtgaacagggacaaatgagcactttgacacagtgcttacattgttttctcaccagtgtgaattacaatgtgactattaaggcatatggacttccaaaaggattttcctcattccttacataaaatgggtttcttggccaggcgcgatggctcacacctgtaattctaccactttgggaggccaaggcgggcagattacctgaggtcaggacttcaagaccagcttggccaaaatgttgaaaccccgtctctactaaaaatacaaaaaatcagccaggtgcagtggtgtgtgcctataatcccagctactcgggaggctgaggcaggagaatcgcttgaacccaggaggcggaggttgcagtgagccgagatcatgctactgcactccagcctgggctacagagtgggacttcatctcaaaaacaaacaaacaaaaaaacatggtttctctccatggtgtttctacacgttcagtaagatgagaagaatgccaggtgcagtggcacacacctgtaatcccagcattttgggaggtggaagcacatgatcacatgaggtcaggagtttgagactagcttggccaacatggtgaaattctgtctctaccaaaaatataaaaaattagccaggtgtggtggtgcatgcctgtaatcccagctactcaggagactaaagcaggagaattgcttgaacttgggaggcagaggttgcagtgagccaagatcatgccactgcactccagcctaggtgacagagtgagactcatcaaaaaaaaaaaaagagagagagaagaactagtgttttcctacatcccttacatttacagggtttctctacagtgtgagtttgtacatatctagaaagattcaactgttcaggctttctcacattccttacattgatagtgttactttctcctgtgaatttttacatgttcagttaggcttgaggaaacagcaaaggtttttccacattcttcacatccacagggcttctctctagtgtgttttcaaatgtgcaatacgagctgagaaagaagcaaaggctttcccacactggtcacattcaaagggtttctctcccatatgagttcttaaatgttgaatacgtcctgaggatgtacggaaggccttcccacattccttacatttatagggcttctctccagtgtgaattcgcacatgattagtaagatctgaatgacaagtgaaggctttcccacagtccttacatttatagggttttattttggtgagagtttttaagcgatcatgaaagcacatggaatttcgaaaggaatttccacatgcgttacattcagaggtcttctctgctgcatgagtttttaagtgttgagttagtacacaagacctactgtaagctttttcacatgcattacatttatagggtttatatccagtgtgagttcttaaatgatcaactagactggaggagacaacaaaggctttcccacagtccttatattcatagggcttatctccagtgtgtcttcgtaaatgtttagtaagatctgagcgttctgtgaaggcttttccacatttcttacattcatatggcttctctccactgtgtcttcgtaaatgtttagtaaggtatgagcgctcagtgaaggctttcccacatttcatacattcatagggtttctctccagcgtgtgttcgtaaatgtttggtaagatatgagcacttagtgaaagctttaccacatttcttacattgatagagtctctcttctgtgtgagttcgcatgtgaatacgaagacaggcagaagaggtaaatggtttcccacatttgtaacacttaaagggcttctcaccagtgtgagttctcaaatgagcaaaaagagatgagaaagaaacaaagactttcccacactggtcacaatcaaagcgtttctgtcctgtgttacttcttctatcttcaataacacctgaggatgtaccaaaggccttcccatattccttatgctcatatggcttctctccattatgaactctcaaatgtccaaaaagagatgggtaagaaataaaggctttcccacagtggtcacatttaaaggttttctctctggcgtgacatcttatatgttcaataaggcctgcagatgtaccaaaggctttaccacattccttacacccatagggcttctctccagtgtgagttcgtacatgttcaagaaagcctgacggcacagtgaaggttttgccacagtgcttacatttataaggttttatcccaatgtgggtttgcatgtgattattaaggtgggtagggtatctaaaatcttttccacattccttacattcataggggtttttaataatgtgtgtttcaacatttacagcatggcttgtggagtgagtaaatgcttccccacattgcttccattcattgagtttttctccactctgagttttcctgtgtgcttcaaggtatgactgataaatgaaggctttcccatagtcagtgccttcaaaggatttatcttgtgtacactttctctggacctgaacatttaaaatcaggcggaaagattttccatgcttactgaacacagaaactttccttatggtagaggttttattgtatagagaaaggaggtcttttgcatactgaatacattcagacgtgttgcctctattttgagtactcatgttggtcttaaggcatggatgtttacagaagacatcttcacattgcttacagtcatagagttcctctccattttggtttcttgcctgttaacacaggaatgaacaataaaggaagcattttagcagacttattaatagataccactcttctaagaaacatgataattattatttttgccacttttataacatgcatatagtttctaccttttggatttccttcaacttgaataatggaaccctactgtaagaatcctatgtcatctgctctaatcttggcaagattcctgtagcttttcatgaagttattttaaaaactcaaatgtctagttatacatgttggaatgaacattcatgggaagtcttaagtaccaagcttcacacaaggtatgggatctctctccagatatttctccccttgggtgaattgggtgaatgccacttctctcaaatatctatcatttctgctgatttcttttttttttttttttttttgagatggggttacgctctgttgcccaggctgtagtgtgcagtggcacgatctcagctcactgcaacctccacctcctgggttcaaacaattcttctgcctcagcctcacaagtagctgggactacaggtacacaccactatgcccagctaatttttgtatttttagtagagatggggtttcaccatattggccaggctggtctcgaactcctgacctcatgatccgcctgcctcagcctcccaaagtgctgggattagaggcatgagccaccgtgcctggccatttctgctgatttctataatgcaataccagtcttctctgaatgtgaaaaataagaaagttcttttgttaatcttaccaactgtatcccatttaatgtttttaaacaaaaattatcttgccaaagggctggccctttggttttcaggcacattttccattctgaaataaaagagaaaaatatacatgagagtttacacatgaaatggtaggttaaataaaaagcagatagatttgaacaatttatatatgtctaaaatttggcaatcatatggggtcaagttttagtaatttttaaaacaacttattctatgaaaattaaacatgatggttaacagaagcaatactaccagggaaggaaaagtcggaaaaattggaacaaaagcatacaataaatccataaacataaagaaggtcatttgttaggtaatagggaagtctggatagatgcaaagcaatggaggatgaaaagttaagatatcccaaaacatccaagtccagtggacagccttctgattcaaagggcatcttataaaacttcattgtgcttccaaacgtactgagaacttctcatggaccagggttgttcttcacaaacactcaccttggagaactcttggcagtgtgctcaactcttcctcttcctccagccaagagatcagactgggtttgaagagctggtaacctgtacacagggaaagatacaccaatggaagaggctcatgcaagaaatggcaaacttttccatgaaacagggactacgtttctaattaaagcagtgaaaagcacttaaattgcatatatcccatctttctgttctctgaagacactggttatctctgacctctgaaattcacattcaagcttaactcatttcctgtttgccccaagaaacaagcactagcagtgagctgcactttttctttctaaatggcaaatgttaaatacaaattctaaaaaccactaaaacctttattaaaatagaaactaatggaagctcaaagagagatcttgattctcctgggaaaactcccattccagtagttctgaactttagagtgaattactcatctgaatacagggccccaacagcagactttttgatttagtacatcgagtctgagaatgtacacatatctaagacagtgatggtgatgctactgacgcaaactaccatacaagattaaaacccattagtacaggaactgtctctgttatttcctattttactcattaaaaaaaattttttttcagtgtgtatatatcccactgtattcagatttgacatcactaatcctagaatacagtaagtacataatttgtatcttgttccagaataggctacaagggatgatgccagacttacctactgaggacaggttcttgtagttctccagcatcacatcactgtacaggtttctctgagctgggtccagtaaagtccactcttcctgggtgaactccacagccacactgtcaaaggttaccaggtcctaaaccatcagacacatgctgatttgagccaagcaacatctccaccaatgttggctgaagaatgaggaagggggacccaatccctgtacagggtactgagtgctcccactatctacaccccaaggttcagtggccctaggaactcttctatccacattcactcactgtcaatttcctccaataacatggctgtaacagaacctcttacacagaaacttatcaaccacaactagaccgggagctcatctcatttgattcctctctactgcaaaacactcctgagcacataacaaatacttgataaatgaggatatggataaattccttaagaaaagaacactttcataccccttaccatctgtcctagcacccagaaaaataaatatgcagttggcaccaggaaaatgaacactaattcataaatacaaaaatactgagataatttccagggtaattcctcaccaatatgagaggtatgactttctgggaaaaattcaactagggtctatatttgctttaaggaagaatacagacaggagtacctacaagaaaatgagtctttgttgatatcattactccaattttagaaggatacaactttcacactaagtttagatctccccaaattcatcattatcagagcatctctccagagacattgctccctcttgagtgaatgctattcctctcaattatcttttgtgcttattttctatattggaagtcccaatattctctgagtgtgaaaaataagaaataccctttcttaacattaccatttgtatcccattagaagtttgtattttccaaaactcctgctgcagtgctgaaacactggtttgatgttttattgcccagtctgaaacaaaaacataaactgaggttttttttttttttaaaaaaaaaggtaaaatgaaagagttaaaaattataggcctcattcatatttgtttttaaaataaacataagaaaaaagaaagctaaattgaacatttagactgtgtcaaaaaattggcaataatgagattaaagggtcaaaattttagctaatttgctacaaattgactcatttagatttaaaactaatgttaaacagaaagaatgttatcagaaaagtaggaaagatctgggccaaagccatatttcaaagcaaagaacttgaaaaacaaaatatatagtttcataagatcatagaaagttggagtagatggaaatttaaagagtatcaaaaattgaatattttctaacttctgagataaatggccttaaccttgtgagagaaggtgcatcttaaaaagttccctcagagggctgggtgtggtggcttacgcctgtaatcccagcactttgggaggctgaggtgggcggatcacaaggttaggagatgaagaccatcctggctaacacggtggaacaccatctctactaaaaatacaaaaaattagccgggcatgttggcaggcacctgtagtcccagctactcgggaggctgaggcaggagaatggcatgaacctgggaggcataggttgcggtgagccaagatcgtgccactgcactccagcctgggggacagagtgagactccgtctcaaaaaaaaaaaaaaaagttccctcattatgtttctgatggtttggatgttagttccctccaaatctcatatggaaatgcaacgccaaatactggaggtggggcctggtgggagatgtttggatcatgggggtgggtccttcatgaatggcttagtgacatactcggagtaataagtgagttcttgttctgaattcatgtgagacctggtagtttaaaacaggagtctccaactccggagccatggaccagaaccaggccacagcacaggaggtgagtggcaggagagcaagtgaagcttcatttgtatttatagctgctctccatcctaattgcctcctgagctccgcctcttgtcagatcagcggcagcacttgattctcataaaagagcaaaatctatcatgaactgtgcatgcgaaggatttagtttgcgcgctccttttgagaatctaatgcctgatgatctgtcactgtctcccatcacccccagatccccaaatgggaccatctggttacaggaaaacaacctcagggttcccattgattctacattatggtagaattgtataattatttcattacagtagagttatggtagagttgtataattatttccttatatattacaatgtaataatagtagaaataaagtgcacaataaatgtaatgcacctgaatcatcctgaaacaatatccctgagacctggtctgtggaaaaattgtcttccatgaaactggtccctgatgccaaaaaggctggggactgctggtttaaaacactatgacaccacccccaacttctcttttactccctttctcatcatgtaatttgtctgctcctcctttgccttctgccatgattgtaaggtttctgaggctctcacctgaagcagatgtcagaaccatgctttctgtagagcctgcagaatcgtgagccaaaataaacctattttcttaataaatcacccagtctcaggtatttctttcttgcaacacaagaacagactaacacagcttctaaacatactgaacttctcactgaccaaggttgttcttcacaaatactcaccttggagaactccttgctgcaaggttctcaactcttcttcttccaaccaagagatgacactgggtttaaagagctgaaatcctttacatgaagaaatgatacattaatggaagaggctcaggccaggcacagtggctcatgcctgtaatcccagcactttgggaggctgaagtgggtggattacctgaagtcaggagttcaagatcagcctaagatggtgaaacccccgtctctactaaaaatacaaaaattagctgggtgtgatggcgtgtgcctataatcccagctacttggggggctgagacagaagaattgcttgaacccaggaggcagaggttgcagtgagccgagatcatgccactgcactccatcctggacaacaagagcaaaattccatctcaaaaaaaaaaaaataatggaagaggctcatgcaagagatgataaactttacattatagaactatagttcttagagaaagcagtgaaattatttcaaatggactaaaactgaaaatatctcttatttctgtgcaccccaaaattggctctctgacctctgaaatgcaaattcatgcttatgtgcacatttacaaagcaataaccttttagtcacagaaataaggtatgttgtcaaactcctgaatgaagaaaaaaaagaaaaaaagtgaaacaaagagacccttgtatacttggagaatacaactacaccagtgattcttaatattatagtgcatcaaattgatgtggaaggatagttaacacacagatgacaatccaagtggagagtttctgattcagtaggtcaaaggcagagactaagactgtacatttctaagggagtaacagtgatgctgtcgaaactggaccacactttgaaaacgaccacagtaattaagacctattatggcagggacaacgtctctggtgaattcagtgttgaacaaaccaattctggaacacagcaagtacacaatgtatatctcttccctaagaggctgcataaaatgatggcagtcttacctactttggccacgttctcataattctccagcatcacatctctgtataagtttctctgaactgggtccagtaaaatccactcctcctgggtgaagtccacagctgtatcctcaaaggtcacggagtactaaaccatcacatacatgttgatttgagccaagtaacagattaaccagtgttcactgaagaatcagttaacagaccccaatgcctataaagagttgtgaggtctctcattatctacccaaagcttaataatcccaggtaaatctcaggtattcctctctctatccttgctctttcactacttaacaattccagttgtatggctttaatggcacatctcaatcatgaacttctcatcacaagcagactgtgagtgctttctcaacttatttccctctactaaaagatatcccagagtacactgcatcatatacttgataaacagcgatgaatgattagcctttttttttgggaagcagggtcttgctctgtcacgtaggctggactgcagtggtgtgatcatggctcactgcagccttgacttactgggctcaagtgatcgtcctgcctcagcctcctgagtagctaggactacagccatgcaccaccatgcctggcattttttttttttttttttttttttgtggagacaatgtctcagtatgttgcccaggctggtctcaaattcctaagatcaagcgataatgccactcacttctcagcctcccaaagtgctgagattacaagtgtgagccactgcacctggccaggattagcctttgagtaaaggatgctttcatcttcctttccatctgccagaccactcagcaaaataagaaatatatatctggcaccataagggacaaaattaattaacaattactgaaatgctgaaatgcttttcaaggattatcagtatgagaacctccactccctggggaaattcaacaagtgactcagtgcttgagtgagtctttatttacttaaagaagctctggagacacatctgcctagaaggaaatgtgtttacctggtgatgcaagtatgtcattttgtggaagtatacattttctgcatacctgataacaatttgtcaggcagtaagccatcttcctttctgcctctgtcttttcttcatgaaggcagattgggttcctagaaagacctggaaaagaaagaaggcataagagcccagacataatcacagttccaacattcgcatgcatggaagttattccaacctggttcgaaattctcttataattcatataaactcacataaatatacattacatccataaaatgccactgcacttctgtctaacctagagcaagaaaaaggaattgtgggccaagctgtcgtaagtaaaagtataatatcctcattgcacaggtaaagaaacttttttttttttttttggagatggagtttcactctgttgcccaggctggagtgcagtggcacgatctcggctcactgcaagctctgcctcctgggttcacgccattctcctgcctcagcctcctaagtagctgggactacaggcacctgccaccacgcccggctaattttttgtagttttagtagagatggggtttcaccgtgttacccaggatgttctccatctcctgacctcatgatccgcccaacttggcctcccaaagtgctgggattacaggcatgagccactgcacctagccaggtaaagaaacttaagacctgaggaatgtaagtctttttgtgcccatggtgatataactcacaaatgagattatgcagcacctcttctcaaagaacacacttaagggggctaacttacacaacaggcctctctggcacacttcaacaactcagaaaggaactactagtgtgaatactaaggcctagagccctggactatatattctgcatggggtactgatatggtgtggctctgtgtccccacccaaatctcatcttgaattgtgataatccccacatgtcaagggcagaaccagatggaggtgattggatcatgggggcagcttcccccatgctgttttcgtgataatgagtgagtctcacaagatctgatggtgggtttttttttgtttgtttttgtttttgaaacagagtcttgctctgtcacccaggctggagtgcaatggcgagatcttggctcactgcaacctctgcctcccgggttcaagcaattctcttgcctcagcctcctgagtagctgggattacaggcacgtgccaccagacctggctaacttttgtatttttagtagagacagggttccaccagttggtcaggctggtctcgaactcctgaccttgtgatccacctgccttggcctcccaaagtgctgggattacagatgtgagccaccgcgcccggccaatctgatggttttataagtatgtggcatttccccggcttgcacccaatctctctcctgccaccctgtgaagaggtgtcttctgccattgatgccaccctgtgaagaggtgccttctgccattgatgttaagtttcctgaggcctccccagtcatgtggaactgtgagttaattaaacctcttttctttataattatccagtcttatgtattttttcatagcagtgagaacagactaatatggttacctaaagcagatttttggaaaaacttaccatagggcaaatcctgtgaggctgacagtgaaatatgtctggacacagttttttgtgattccaaggacatatcagggtagcttataaatctaagtggataactggcaatctattcctctttatatagagtatctggactcatgtagacatcaatcattaatcaacaagcgttacttatcagtcatcaaataccatatattaaatctttactgctggtgatatgtgtaaaacccactagaaatagtatatgttctgtataaaatgagtattaataacaccaactgccatttactagggactgttatatgttagacattacatatatatacacatacatatgtgcatatacatatatacatatatatatgctcacttatctgaacaatatccctatttagtgctgaaaaaaatctaaattcagaaaacacaaatgactcttctaatatcatctacttaggaagcggtgaaccaggacttgaatgcagtcaagtttgtccctaagtctaatcctctgtggttgttattactcccccataatgactgccatataaaggactctgggaattgatacctggcttacttaaaatgtgctattctacttttgactataaagaattagaacaagaatgtcatcctttacaaacaagtcagaactcatttccaactctggttgcttcaacagggttccaagtagaacactgaagttagcgttcagagttctgcccattgctcctgcaagaggacaaaaaacatgcagagcagcaatcgcaaatcagactctgccccttatattgactatttgatgggtcttctcagaaaatcaccttttattattattcatgagttctctttttcctaaaatttctgcttgtatttttatcccttccttcctttatggttcttacaaatcaaatgaaaaacgcaattgagatcatcaacagtagagaaggaaaagaaaaaaatctttgaacttgaaaacagactacttagaaatacacaaaggagaaaaaacaaaaatgaagaaaaattacaagattcaagggacatcatcaaaagagcaaatttttgagttacaggagtacaagaagacaagaaagaaagagaacacatacttaaagaaacaataacaacatttccacactgaggaaaatatataaatatccatactcaggaagggcaaacatctccaatcacattcaatccaaacaaggctaccctaagatataatataatcaaacagtcaaaaatgaaaagcaaagtgaagatcttggaagcagcatgaaaaaagatgcaaatcacatatgaacgagttccaataaggttatgagcagacctgtcaccaaagaccttacaggccaggagagaatgggatgacatatataaactgctgtcaggaaaaacaaacaaacaaaaaaactgctcacaaagaataccatacccagcaaagctgtccttcaggaatgaaaaagagatgaagattttcaaagaaaaacaaaagcagaggtagttcatcgacaccagacctaataagaaatgctaaagggagttctcaagcttaaaaaaaggacactaattagtaacaagaaaacaaagcacaaaactcaggtaaaaataagcacgtagctaattcagaatactcaaacactgtaatggtggtttataaatgaattatatccttacgatgaaggttaagagataaaagtattaggaacagtaagagctaaaataattaagggatatacaatataaaaatatgtaaattacaatatcagaaaaataaaatgaggagaggttgagttaaagtatagttattttatgtgatcacagttatcggcttaaaatatcctgctataagatgtttcatataagtcttatggtaaccacaaagcaaaaatgtatagccaacacacaaaagataaaaagtaaagaatcaaaagtacactagagaaaattattaatcacaaaaatagacaaaggaagaaacaaagaatataaaaaaaaaccccacaaaacttaacgagccaggtgcagtgcctcatgccactaatccctgcactttgggaggtggaggcaggtggatcacttgaggccagaagttcaagactagccatggccaacatggcgaaaccttgcctctactaaaaatacaaaaattagccaggcatggtgacgggcacctgtaatcccagctattcaggaggctgaggcaggagaatcacttgaatgggcaggagaatcgcttgaacccagcagatgaagattgcagtgagccaagatcatgccactatactccagcctgggattttttttttccaaaatggaaaaaaaaaaagaaagaaaactattaacaaaatggcagtagtaagtacctacctacaatgattactctgaatgcacacacactaaattctccaattcaaagacagaatggccaagtggattaaaaaaacaaacaaagacacaaatgatcatgttgtttacaagagactcacttcatccttaaggacatacataaattaaaaacaaaagggcaggggaaaaaacactccacacagatagaaaccaaaagacagctaagttaagtattacttatatcagacaaagtgaactttaagtcaaaaaccgtaacaggacacaaaggtcgttatatgataataaaggaatctaccaatcaataagatagaataattataaatatacaattggccatctgaattcatgagtaccacatctccacttattagggtagattcaacctgccatggattgaaaatatccagaaaaaaaaaatgcatgggtccaactttattatatatgtgcacatattttccctgctcattattccccaaataatacagcaaaacaactatttacatagcatttactttaagttttacagtaatctaaagatattttaaagtacatgagaggatgtgcatgattttcaaacaaatacaacatcattttataagagacttgaacatgcctaaattttggtatccacaggtgggggaggggttataggaaggggggttatcctgaaacaaatcccccacagattccaaaggatgactacatatgccaacaacaacagagcacgtaaacatataaagcaaattaataatagatctgaagacagagatagattgcaataaaataatgggagactttaataccctactttgaacaacggacagatcattcagacagaaaatcaataaagaaacatgagactagaactacactttagaccaaaacaatctaacaacatacacagaacattccatccaacagcagcaaaatacacattcttctcaagtgcacacagaacattatccaagatagatcatatgttaggtcacaaaacaacaacaacaacaacaaagcaagtcttaacaaatttaagaagcttaaaatcatatcaaacatcttttctgactacagctgtaagaaaatagaaatcaacaataggaagaaaattagaaaattcacaaataggtggaaatgaagtaacacacacctgaacaagcaaaggatttaaagagggcagttaatagcaataaatgcctatatgaaaaaagaaaatcacaagtaaacaccctaacactgcaccttgaggacttagaagaacaacaagaactaagctgaaagttagtagaaggaaggaaataataaagaccagaactgaaataaatgaaactaaaaaaaaatcacaaaagataaaggaaactaaaagttttctgaaaagatgaacaaacctttagatagatcaaggggtgaagagaaaaaaaaaaagccgggcacagtggttcacaactgtaattgcagcactttgggaggctgagttaaaaggatcaactgagcccaggagttcaaggccagcctgagcaacatagcaaggtcctcatctgtacaaaaaaatgctttcaaaaatagctgggactgggcatggtggctcacacctgtaatctcagcattttgggaggccaaggtgggaagattgcttgagctcaggaattcgagaccagcctaggcaacacagtaaaaccctctctacaaaaaatacaaaaattagttgggtgtggtggtgcacgcctgtagtcccagctattcaggaggctgaggtaggaggatagcttgagcccaggagagagaggctgcagtgagctgagatcatgccactgcattccacctgggcaatacaggcagagattatctgaaaaaaaaaaaaaaaaaggcctcagaaataacaccacacatctacaccatgtgatctttgacaaaccagacaaaaacaagaaatgggaaaaggattccctatttaataaatggtgctgggaaaactggctagccatatgtagaaagctgaaactgtatcccttccctataccttatacaaaaattaattcaagatggattaaagacttaaatgttagacctaaaaccataaaaaccctagaagaaaacctaggcaatgccattcaggacataggcatgggcaaggacttcatgtctaaaacaccaaaagcaatggcaacaaaagccaaaattgacaaatgggatctaattaaactaaacagcttctgcacagcaaaagaaactgccatcagagtgaacaggcaacctacagaatgggagaaaatttttgtaatctacaaatctgacaaagggctaatatccagaatctacaaagaacttaaacaaatttacaagaaaaaaatcaaaccaccccataaaaaagtgggcaaaggacatgaacagacacttttcaaaagaagatatgtatgcagccaacagacacatgaaaaaatgctcatcatcactggtcatcaaagaaatgcaaatcaaaaccacaataagataccatctcaaaccagttagaatggcgatcattaaaaagtcaggaaacaacaggtgctggagaggatgtggagaaataggaatgcttctacactgttggtgggagtgtaaactagttcaaccattgtggaagacagtgtggcaattcctcaaggatctagaactagaaataccatttggcccagccatcccattactgggtatatacccaaaggataataaatcatgctactataaagacacatgcacatgtatgtttattgcggcactattcacaatagcaaacacttggaaccaacccaaatgtcaatcaatgatagactggattaagaaaatgtggcacatatacacaatggaatactatgcagccataaaaaaggatgagttcatgtcctttgtagggacatgcatgaagctggaaaccatcattctcagcaaactctcacaaggacaaaaaaccaaacacagcatgttctcactcataggtgagaattgaacaatgagaacacttggacacagggtggggaatatcacacaccagggcctgttgtggggtgggggtatgggggagggatagcattaggagaaatacctaatgtaaatggcgagttaatgggtgcagcaaaccaacatggcacatgtatatatatgtaacaaacctgcacattgtacgcatgtaccttagaacttaaagtataataaaaataaggaagggaggggggaagggggagaaggaaggaaggaaggaaggaaggaagaaaggaaggaagccaggcatggtagcacaaacctgtagtcctagctactcaggaggatcacttgagaccaggaagtcaaggctgcattgagccatgactgcagcactgcactccagcacaggcaagagcaagaccctttctcaaaaagaaaagacctccccctccccctccccctccctctccccacggtctccctctccctctctttccacggtctccctctgatgccgagccgaagctggactgtactgccaccatctctgctcactgcaacctccctgcctgattctcctgcctcagcctgccgagtgcctgcaattgcaggcgtgcgccaccatgcctgactggttttcgtatttttttggtggagacggggttttgctgtgttggccgggctggtctccagctcctaaccaggagtgacctgccagcctcggcctcccgaggtgccgggattgcagatggagtctcgttcactcagtgctcaatgttgctcaggctggagtgcagtggcgtgatcttggctcgctacaacctccacctcccagccgcctgccttggcctcccaaagtgccgagattgcagcctctgcccggccgccaccccgtctgggaagtgaggagcgtctctgcctggccacccatcgtctgggatgtgaggagcccctctgcctggctgcccagtctgggaagtgaggagtgcctcttcccggccgccatcccgtctaggaagagaggagcgtctctgcccggctgcccaccatctgagatgtggggagcacctctgccccgccgccccgtctgggatgtgaggagcgcctctgcccggccgcgaccccatctgggaggtgaggagcatctctgcccagccgccccgtctgagaagtgaggagcccctccgcccagcagccgccccgtctgagaagtgaggagcccctccgcctggcagccaccccatctgggaagtgaggagcgtctccgcctggcagctgccctgtccaggaggtggggggtcagcccccgcccggccagccgccccgtccgggaggggggtggggggtcagcccccgcccggccagccgccccgtccgggaggggggtggggggtcagcccccgcccggccagccgccccgtctgggagggaggtgggggccagccccccgccggccagccgccccgtcagggagggaggtggggggcgcctccgcccggccgccgccccgtctgggaggtggggggcgcctctgcccggctgccccttctgggaagtgaggagcccctctgcccggccgccaccccatctgggaggtgtacccaacagctcattgagaacgggccatgatgacgatggcggttttgtcgaatagaaaagggggaaatgtgggggaaagatagagaaatcagattgttgctgtgtctgtgtagaaagaagtagacataggagactccattttgttctgtagtaagaaaaattcttctgccttgggttgctgttgatctgtgaccttacccccaacccggtgctctctgaaacatgtgctgtgtccactcagggttaaatggattaagggtggtgcaagatgtgctttgttaaacagatgcttgaaggcagcatgctcgttaagagtcatcaccactccctaatctcaagtacccagagacacaaacactgtggaaggccccagggtcctctgcctaggaaaaccagagacctttgttcacttgcttatctgctgaccttccctccactattgtcctatgatcctgccaaatccccctctgtgagaaacacccaagaatgatcaattaaaaaaaaaaaaaagaaacagaagaactgctgaaagccattgcactagagccgcactacccaatatggcagccactagacatgtgtggctactgagcacttgaaatgacctgtgtctgaattgaagtgtgctctaaatgtgaagtgcacaccagattttaaaggcttagtataaaagaagcataacatatctcattaataattgttttctggcagagtatggtggctcacacctgtaattccggcactttgggaggctgaggcaggcagatgacttgaggtcaggagtttgagactatcctggcgaacatggtgaaaccctgtctctaccgaaaatacaaaaaaaaaaaaaaaaaaattagccaggcgtcacagcgcgcgctacttgggaggctgaggcaggagaattgcttgaaccgcagaggcggaggctgcagtgagctgagatcgcaccactgcactccagcctgggcgacagagcaagactccatctcaaaaaataagtaaataagtaaataaataaataaaattaagcctttaaaaaataaaaaaaagaaaaaaaaagaaaagaaaaaattaaaaagaacactcaaataaaatcagatatgagagaggaaacattagaactgttaactacagaaatacaaaggatcataaaagactacttggaaaaattacatgccaacaaactggataacctagcagagatgtacaaatttctagacacacacaacctaccaaacactaaatactaaaaaggagaaaatctgaacagaccaataatgaagaaggagaccaaatcactaactaaaaatctcccatcaaacacacacctaggacttgactgcttcatggctgaattatataagacatctaagaatatctaaaccaatccttctgaaattattccaaaaaactgaagaaggatgctacaaagagaaacttacaggccaatatccctaagtatacagatgcaaaaatcctcaacaaaatactagcaagctgaattcaacagcacattaaaattatcattcataatgatcaagtaggatttatccctggaatgcacggatggttcaacatatgcaaatcaatgtgattagaaccacattaacagaattaagtataagaatcatatgatcttgtcaacagatgcagaaaaaggatgagatcacaccactgcactccagcctggacgacagagcaagactacatctcaagaaaaaaaaaaaaaaagtgctgaagaacattaaccaaaagattttttttttttttgagacagagtctcgctctgtcacccaggctggagtgcaatggtgtgatctcagctcactgcaacctccacctcctgggttcaattgattctcatgcctcagcctccctagtagctgggatgacaggcgtgcactgccacacccagctaattttgtatttttagtagagacagggtttggccacactggtcttgaactcctggcctcaagtgatcctcccgcttctatctcccaaagtactgggattacaggcatgagccaccatgcccagccccaaaagatttgtaacctcaaataagttgagaaacatgctcaagtatcttaggggaagagggatcaagtactccttccattcatctttttaaaaaacattgagctaccattctccatgaaaggcatctgccataacccatggagctggcaggggcagggagcatcagcaccaaaccagaatagcatcgcaacataggaggcacctagcaaggtgtagctggtgcaaatatacaaaagaggagcccaattctattgccagggtcccttcttcaaatcacagtcacttgtatgtgcattaagaaatgcccaattcacatgaacacatgactccagatcctggagaagaacaggataattacccctcttcctgggatcatggctggtaagcagtatcctggggtgcattatggggactagcacagggtccaaactttatgacaaagactcttggccaacactcggaagggacaacacaaagcatgacacagcaatacacataaactccaacaagacaggcagccttcccaaatggtacagggtggaaagtaaaaaagttcctcttcaaagtttcccttcttgttaaagaataaatcataagtgttagaaataatattttcttttaggctgggcacggtggcttacacctgtaatcccagcacttttggaggctgaggcaggtggatcacctgaggttaggagtttgaaaccagcctggccaacatggcaaaaccctgtctctagcaaatagacaaaaatgagccaagcgtggtggcaggtgcctgtaatctcagacacttgggagactgaggcaggagaatcacttgaacccaggaggtggaggttgcagtgagccaagatcatgccactgcactctagcctgggtaacaagagtgagactctgtctcaaaaaaaaaagaagaaaagaaaaaaaaaagaaataatagtttcttttaaagactaacttccttcaagcctccttgctttgtgctaataactctttgttaagccctatcctatgtagctgttagatataagggaatgagtacattctatgtccttgtactttaaccaagatatttattctagacatgctcagccatgtcccagctcacagcttatgccccttccttatttggaaatgttattacttctctaagtcttttcgtaagcaacttcctcttttcctttgttttcccttgtctttacctatttaggaaagttttaagttattggccagtcaggtttagcttagattgtgtggtccacctccagccaatgaagacaggacacagcagcagggacaagctccataagggataaaaattgcttccctcctttgttcatgtgtcatctcgtcattgttccatctgcgaggaccaccctttctgcagaaagtaaaattgccttgctgagaaaattctttgtctgagtactagttcttctcagcacagaggaacaagcatttctaaaggaataagcattttacttatatggccaatcagcaagccacaaaaggacaaagggcacttacaagagactttccaccccagttcaaagtgatcttcaccctttttaccaactgtgttgtaaatggggcactaagtcacttttgtgggatgtttcaggatccctccaacacactcttgcaattacactttgagaggctcatgatattagatttattatactcatagatcctagaaagggaggcatgccatgccatgcaggggtccatgctggaggaggaccaaagcaggaggctctgacaagcatgtagggagctaagagagaagcctcccttgagggcaactgcctttactggggcttggggtatagtactaaagcaaaaggcattagatttcattggtgcatttgaatgttactaggtcatggtcaggggagggccaacagaagaacttgtagcataagtaccttatcatccttgtacatctggtcacttgagcagggagctcacagcctgtttgttagaatgctgaggcatcaagaaaatatgaattttttaaaatgtacaatgtattcagggaagaatgacaatatggaacctggaacgaagacatctggttggatccagataagaaacatgatcttaaaccccactatgatttggatgtggtctgtccccatcacaactcctgttgaggcttggtcctcaatatcacagcactggaaggaggggcctaatgagatgtttgggtcatgggggtagatctcacataaatagattaatgctaccaggcagaagtgaattttagctcacacaggactgaattagttcccacaggagctaactgttataaagcaaggctgctgtttgtgtttggtcccttttgcacaagcctgcttcctcttctgcctctctaccatgttttgccgcaacacgtgagcctcatcagaagtagagcagatgctggggccatgctcttagactttccaaccagcagaatcctgagccaaagaaacctcttttctttataaattactcaggtattatgtcatagcaataataaagagactaacacaacctaagacactttgagcctcccttaccagggacgtagcttaccctttggtttctgaggagaaagccttctgcttgaaatttttgtgacaatctcatttggtccagataccttggaaggtaatatatattctcctcaagatccacaccattatcacttatttttatcactagagtcctaactagtccaaaatccagggagaaagatatacaacataatgcaagagaaaaaagctcacacaacaaaaaaattccaactctgataatatatcacaagaaacccagggaacatgtatgggatggattctaagggtattagatcaagaaggttaaaatgttaacattagataggcccaaattcattgatatggagcactgatatggtttggatctgtgtccccaccaaatctcatgtggaactgtagtccccagtgttggaggtgaggtctggtgggagatgattggatcatgggggcagatttctcatgaatggtttagcaccatctcctttgatactgtcctcatgatctggtcatttaaaagtgtacagcacctccccctcattctcccttgctcctggctcctgccatataagatgtacctactcctgcttcaccttctgccatgactggaagcttccagaggcctccccagaggcagaagtcactatgcttcctgtacagcctgcagaactgtgagccaattaaactttttttattctgcaatttaaaacttttaattaaaaaataaactttaatgttgaaaatgcaaacttggagagggcagaaagatcacacacaaggctgtcacttcacacttggaggtttgcacagtggctcgacagaggtgctcctcacttcccagacagtggggcggccaggcagaggcgctcctcgcttcccagacagtgcggcggccggttagaggcactcctcacttcctagacactgcagtggccagacagagtcgctcctcacttcccagacagggtggtggccaggcagaggtgctcctcacttcccagacggtgtggtggctgagcagaggcgctcctcacttcccagacggtaggcagctgagcagagatgctcctcactttccagacagtggggctgccgggcagaggtgctcatcacttgtcagacagggcggtggccaggcagaggtgctcttcacttcccagacagttgggtggccgggaacttctttataaattacccagtctcatgtatttttttttttttgagacatgtcacccaggctggagtgcagtggcgtgacctcggctcaccgcaagctccgcctcctaggttcacaccattctcctgcctcagccttctgagtagctgggactacaggcagctgccaccacgcccagctaatttttttgtattttcagtagagacagggtttcactgtgttagccaggatggtctcaatctcctgacctcatgatccgcccacctcagcctcccaaagtgctgggattacaggtgtgagccactgcacccggccagtctcttgtatttctttatagcaatgtgagaatagcctaatacaggtacttactagacattttgaattttacatattagctaatggaccatggcatgattctaatagctaaactggttggatgattgaaacttgtactcatgacctagttaacagagttaatatgtaagagcttccctggctaatgtaaaggagggaatcctagacacacaggaaggttgcactgaatttatcacatgtgatctgcacagcttcccttcttcaacctacattaagggcccagaagacaccctcttcacaaaggcattcagaaatagataactgaagggaatacttccattcttgaaaagttctgtttattctcctttaaacatttgttaagactacaggagataacaatcattaagatgagttccctgtttcaatggggatgatgagaaccttgagtgccaaaaaccaagtgggtagcacttaactatcaaagacaatgaggccacatcgaatgtcaagggcacactgaatgtaccaataattggaatgctttggcctgcagagattattggtgttagcaaactgatcacatttcgtcactagcatgaaacagataagaaccctactataacagggattaataaatcttgttgtaatgtgacatatagtaaatgttatactctgtgggccacacagtctctgttacaaatactcaactctgtccttgtagtatgaaagaagcctcagaaaatatataaacaaatgaacatagttgttctgttccaattataatttacaaaaacaggttgaagattaggtgtgtcccataagccacagtttgccaatgtaagtcttggaatattgcttgatctatgtaacaagaagtctcaagtctaatggccaaaaacctgataagagtcaccacaggggagattcaaagtctctcacccaatcaccagacctaggtaacacaccactcaggattgtgcagaagtcacatcgactttggagaattacgggggactatcataacttatatcaattctcctgttttccaccgaaatagtcttcagaggttttgctattacacaaaacattgcaacactccatcacattgaaaatattttgtacatgatatcccatgaacaggaaacagtaaatagtttggatacctttacaggctacaaagtagaggatgggagattcaagagccagctaaataaacaaagttggttttgttttgtttttttgagacagggtcttgctctgttgcccaggctggagtgcagtggtgtgatcacggctcaccacaacctccaccttctaggctcaagtgatcctcccacctcagcctcccaagcatctgggacgacaggtgcacattactacaccaggtaattttttttcttttaatcttttttggtatagatgggatctcactatgttggccaggctggtctcgaactcctggcctcaagcaatctgcctgccttggcctcccaaagtgttagagttacaggcctgagccaccatgccccatccaatcaacaaagatttgtgggttcagttgtctagaccatatcaagatatcccctccaaggtgtcattcctagttagtgctccccaaaattaggtgcaacacttggcagacctataagattcttggccaggcatggtggctcacacctgtaatcccagcactttgggaggctgaggctggcagatcatgaggtcaggagattgagactatcctggctaacatggtgaaaccccatctctactaaaaatacaaaaaattagctgggtgtggtggcacgcgtctgtagtcccagctactcaggaggctgagacaggagaatcgcttggacctgggaggcagaggttgcagtgagccgagatcctgccactgcactccagcctgggcgacagagcgagactccgtctcaaaaaaaaaaaaaaaaaaaacagggataaaggctactatggctcaacagtatggacttccatttaccaaagctaatgcagctaatgctactgctaggtgcctaatctgctaaaagcaaaaaccaaaactgaatatataagggcattaatttcttttttcttttcttttgggggggggacaggtctcactctgtcacccaggctggagtgcagtggcatgatcacagctcactgcagcctcaatctcctgggctcaagcaatctttctgcctcatgctcctgagtagctaggactacaggcatgtatcatcaagcctggctaatctgggtggttttcgtaggggggttgattttttgttttcatagagatggggtttcaccatgttgcccaggttagtcttgaaccaagggcattaatttctagagtaaccaggggagccagctggtggcaagatgattacattggaccactcctatcatgaaggtgactaagattcatcttcactggaatagactcgtgttctggatatggatttgccagaagcctaactagtagagaggcaaatccatataggatttgtatagaggcagatttgtacagaggagaggcaaatccactaggcttttgcctatacaatgcataatccatgcactcacaaaatgctttcactgcagtcacagcattcacacaataccatctttcatcaaggaacccatttcactgcaaaggaagtgcaacagtgggaacatgtccctctcatcagctggtctcatcacacaccccatcactcagaagcagctagtctaaatgaaaggtgaaatagcttactgaaaattcagatacagggccaactgggagacaacctctgaaagaatgggattctgtttcacaagacacagtgtatgctctgaatcagagatcactagatactactatctcaccacagtcagaacaaacaggcccaggaattgatgggtgaaggcagaattagctctaagacaaaaattttgcttccaatcccagcaatgtagagcactgtaatttggagatctgagtccataatggggaatgcttccccaggggcaactatttatttggtcccaatacactggaaagtgagattaacatctggcccttataagtttcatatccattaaaccaagaagaaaaagaaaaataaggaggtgagagggtataatctattaactgaagggattaatctcaactaccaaagggaaactggggtactactatacaactgaggcaaaaagaatgatgtctagaacctcctagcacttccataccacttagaaaggttaacaaaaaattaccgtagaaaaaaggcaggaaaatggaggaccaagatcccttcagaaggaaggtttgagtcactccatcaggtacagagcccagagctgctgattctggctgagggcaaggaaaatacaaaaaatgttcatcgaaaaagtaaaaccatggatagcaactataacttcaagatcaatgacagaaacaacaactgcagtagtctggcaggttttctgtttttgcttttttgagacggaatctcactctgttgcccaggcaggagtgcagttgtgccatctcagctcactgcaacctccacctcccagattcaagccattctcctgcctcagcctcccaagtagctgggattacaggcgcccgccacgcccaactaatttttgtattttcagtagagacaggggttcaccatgttggccaggctggtctcaaactcctgacgtcaagtgatccacccgcctcccaaagtgccgggattacaggtgttagccaccacacccagccccaggttttctctttgattgttacgtatacatgttagtttctaagcatgtatttacataaaccaatcattcacttctgtctcttttctatttctattttgtatataagttactagaggttaaatttttaatttagtcttcaggtaacagaatattcaaggagaatatgactaaatttcagtagaaattaacatggcttcaggcatggtggctcacacctgtaatcccagcactttggaaggccgaggtgggcacatcacctgaggtcaggagttccagaccagcctggccaacatggtgaaacactgtctctactaaaaatacaaaaattagctgggcgtggtggtgtgcacctgtaatcccagctacttggaagctgaggcaggagaatcacttgaacctgggaggcggaggttgcagagagctgagatcacaccaccactcccagcctgggcgaaagagtgagactccatctcaaaaaaaaaaaaaaaaaaagaaattaatatggcctgtgatgaggggctgtgcacattctcacttaggggtgagaaattctcccttcaatcttgttaagtggaaatgcagacttaaccattataagagaatcaaagtgtgtatagatgggcacatgtggatgctgactaggcaaaactgtgaacatgccagttaccaagttatccatctcagctccaaattcacgatcatatctgctaggaacaaagggctgcattccttaagcatttatcttttaatggaacatgttaagctttatcatgttgcattaaaagatgggagggaggccaggtgcaggggctcacccctgtaatcccagcactttgggaggccaacgtgggtggatcacctgatgtgaggagttcgagaccagcctacccaacatggcgaaaccctgtcactactaaaaatacaaaaaattagccaggcatggtggcaggtgcctgtaatcccagctactcgggaagatgaggcaggagaattgcttgaacctgggaggcagaggttgcagtgagccaagatcacgccactgcactccaccctgggcgacaagagcaaaactccgtctcaaaacaaaacaaaacaaaaaattagccaggcatggtggcgaatgcctgtaatcccagctactcagtaggctgaggcaaaagaatcacttgaacccgggaggcagaggttgtggtgagccaaggtcacaccactgcactccagacagcaataagagtgaaactccgtctcaaaaaaaaacaaacaaacaaaacaaacaaacaaacaaacaaaaaacctgctggtagattctaggagctgagcacagcctctagcaacagccagcaacaagtcctataactgcaaggaaatgaattttgcctattgactgagtgtggaaatacattctgttataggcagaggttggagcaagccgaggttgcaccaccgcactctagccagagcaacagagcaagactctatcaccaaaaaaaaataaataaaaataaataataataaaattctactgtaggtttcagctaaggcaattaaacaagacacagcatgcttatcaaatttgtaaatggactatagaatttgatgactgatagaactggattcaaaattactgccacaggctggagtgatacactgaataaataggatatttatttttaaaaaagaaatagaatatacaacacaagaattaaacaacactcatataaaatgtctcacacataaaatataaaccaaaacactacacttctggccagccacagtagtagctcacggctgcaatcccagcactttgggaggccaaggtgggccaatcacttgatgccaggtgttcaagaccagcctggccaacatgatgataccgcatctctacaaaaaaataccaaaattagccaggcgtggtggtgcatgcctgtaatcccatctacttgggaggctgaggcatgagaatcacttgaacccaggaggcggagggtgcagtgtattcagatggcaccactgcactccagcctgggcaacagagcaagaatctgtctcaaaaagtcgggggcggggaaagaaagaaaagaaagaaagaacactatacttctgaaaatatatttgagtattcttattcaggatgaaactgaacaagacactgactttctttttgaaaacaagtggctttcagttaaaactaaaatctattttcagatgtagcaacagtaaaacaaacaaacagaaaaaacaaacaaaaaacaaactaaagtctgttccttatttctctccagaataatttttacactttacaatacatccattcagaaactgccaaatggtacaagacctatggatgggaatttataatatccagcaaaattaaatgtatatttgtcctctgacctaaagtccaatattaaaggtttaacctagtaatacacttataaaaatgttaactacatataaagaagttcatttactgcagcttactcatggatgctaaaataattagtaggaacgttgccggggaacaagatattctgggcgtcctgcaagggatggtggctcatgcttgtaatcccaacattttctgagattgaggtgggaggatcacttgagcccagtagttcaaggctgcagtgagctaggatcgtgacactgcactccaccctgggcgacaaaatgaatctcaaaaacaaaaaacaaaaaacaaaaaaaccccgcaaatatatatatatttttgtattttgtatttttagtagagacagggattcaccatcttggccaggttggtagagaactactgacctcgtgatccacctgcctcagcctcccaaagtgctgggattataggcgtgagacaccgcaccaggcctggctttggtctttttgactaaacctcttctgaaatgtgttcaataaaaagctgaacttggaaaaaaaaaaggtgggggtgggggggacagggaggaaggcaagaaaaacaaaagacaacaaagaagatcctggccaggtgcagtggctcacgcctgtaatctcagcattttgggaggctgaggcaggcggatcacgaggtcaggagatcaagaccatcctggccaacatggtgaaaccccatctccactacaaatacaaaaattagctgggcgaggtggcacgtgcctgaaatcccagctactcaaaaggctgaggcaggagaatcgcttgaaccagggaggcagaggttgcagtaagtcgagatcacaccactgcactccaccctggcgacagaacgagactgtgtctcaaaaaaaaaatagaatgaaatcctgtcattttcaacaacgtagatagaactggaggacagtacgttaagtgaaataaaccaggcacagaaacacaaagttgggcgtggtaagcggtggttgcagtgagccaatatcatgccaccgcactccagcctgggcaacaaggcaacatcctgcctcaaaaaaactctcaaaaaaaaaaaatcttgaatagagctcagatccaaaaacattccgttatattttagaagaatttggagaattttcatttattatacatagtaaatattagataacattattatttttaattttcttgatgcaaatagtattacggttttagtaaaacaacactcttatcattgagtcaggcattacccactacttaaatgtcgagcttaccatcctggctatcacggtgaaaccccatctctacaaaaatacaaaaaattatccgggcacggtggcacacccctgtaattacagccacttgggaagctgaggcaggagaatcgcttgaacccgggaggcagaggttgcagtgaggcgagatcgcgccactgcactccagcctgggcgacacagctagaccccctctcaaaaaaaaaaaaaaaaaaaaaatgtcgagcttcatctctgcaatgaatttcccattgactctcaaactgttcaccataaaatttatttacgagacggcgaatacacaaaacgctaaaaaacaggtgcagctacaatggatatttattcgtggtactggatggtcaacatacccataggtttaagttttttcgaaaaaaaatgcgggaaaaatacacttagtacagtcatcctgttaatggtaaattcgattattctagtattagtgtgtaaaccctccatcctttcttccaggaagcctggttatgaagctctttggagacgtacagagctaggaacttcagatgaaaagaatggctgagtattcttaggtttctttagtagaaagactcgcggtctacaaacgtttatatgcacatgcagaaatacgcacaccctagacaactaagaaagcacctttctaccggaacgtaatgtgtcaataaaaaatatacaggtttcacaaaggcaaaatgccaaaatctcacatgaaacactcgtttgcataaaaaaggaagcagctgcccccttaaaccaactttttcccaatgctcacccgaacacggtggagtcgccaggtccgtggggctacaggatcttggggacggagtcaatcgaacgcgaacggcaaaattcttttccctctgaaacacaattcacaaacgttgccttggagacttattttttaaggcctcagaacgcttggacacttttgaagacgggaacacacggctgaaaacagccctcggacgcgcccatactgcacttcccacccggctcctctaggggaccgaaggtcccaatggcctcttcgacgtggcctcacccgatggctccgcgactcctgcggactcctgtggagtggtccaggcctctgtaaggaggttcctcgattaccctgggtcgattgtgacctctgccaccccccgaaacaccgcccaacccactagtccacacgagcctcaccaaagtagtgaacgaccagacaacacaaaggaaaaagtggctctgaggaaacaggcgccagcgaccaaaagagagaactggcgcgccgcaacgtcacttccgtttggggcattggaaggggcgtggctcgttgtgtgggcagttggacaggatggaactcttcaggattctagtttccctccgcgtgggtgcggaggtatcaaggggtcggctcagtgcctgggtgggcaagagagaaatggacccacagagaaaggtgggggttaaatcagggctgtgggcggggcccatgcccgggggcggggctggaggtgggaccagacccagccggtggcttcggtggcagaatggaccaggaaggcgaaacgtcgggcgatggactcgcccctcaggatgctcattagaaactttccccacgttcctggacccctttcaggattctctccagttgataacctgccaatccacaaaatggcctgcttcctgcattcgatcacgtctttagaactttattttctcttatttctttttatttatctgaccttgctaaactctaatcattgattcctctgcgttttcagttatcgatactttctgtaaatattgcaatttttttcttttctttcttttttcttttcttttctttttttcttcgaggtagggtctggctcggttgccaaggctggaatgcagtggtaggaacacggctcactgcagtctccacctctccaggctcaagccatccttccacctcagcctcccgagtagctgggaccacgggcgcaccgcacccggctaatttttgtattattattattatcatcattattattattttgtagagacaggatctaaccatgttgcccaggctggtctggaactcctgggctcaagtgatctgcccgccctgcactcccgaagtgggattacaggcgtgagccatcatgcaccatgcctggccttattgtatttttttttcttcttcaacaatgtatttgttactatttctcaaatcttatcaaatgattcaaagcctcctgtactactttatgaaataacactgataccaggcattcttcacttattctgtgcagaaaaagaaaggactgttggacttgtggtagagatttagttgaatcttcgggttatattggtatctttataatactgagtcttcctatgtgtgaatatacaatatctctctatttaggtcttctttaaactctttcagtaatgttttgaaattttcagtttacaaatattttacctcttggggtaaagttattcccatgtaacttatttgtaaaagggatcacattctcagtttccttttctgattgttcattgctggtgtatagatacaaaactaattttcatctcttgatgttgtactgtgcaactttacggaatttattacaagctctgctagttttcttgtagattcttcaaaattctctatatatcaaatatcacctataaatatatttttatttgttctattctaattgagaaaccttttattttattttcttgtgtaattgctctggctagaatttcctgtagaggctgggcacggtggctcactcctgtaatcccaacattttgggaggccgaggtgggtggatcacctgaggtcaggagttcaagaccagcctgaccaacatggtgaaaccccgtctctactaaagatacaaaaaattagccaggcgtggtggttggcacctgtaatcccagctactcgggaggctgaggcaggagaatcacttgaacctgggaggcggaggttacggagtttgcagtgagtggagatggctccattgcactccagcctgggtgacaagagcaaaacttcatctcaaaaaaaaaaaaaaaaaaagaatttcctgtagaatgttgaataacaatagaaaaatcagacatctttctctccttcctggtcttagggagaattttcaggcattcactattgaatatcacgttagctgtgttttcgtaagtgcgttttgtcacgttgaataaactcccttctgtttctagttttcttaattttttttttgagacaatctcgctctgtcacccaggctggagtgcagtggcatgatcttggctcactgcaacctccacctcccgggttcaagcaattctctgcctcagcctcccaagtaggtgggcactcccaagtgcccaccacaacacctggctaatttttttgtatttttagtagagacggggtttcaccagcttggccaggctggtctccaactcctgacctcatgatccacctgccttggccacccaaagtgctgggattacaggtgtgagccaccacgcctggccagttttcttaatttttatcaaggaaaagtgttgggtttcatcaaatgcctttcctgcattagttgaggtgattctgtgggattttttgtcttttgtactaatgtgaagaattacattttttaaatttccttttgttgaaccaaccttgcattcctagataaatctcactagtcatggtgtatagtgcttttaatgtgctgttggatatgatttgctaatattttttaaggatttttgcatctatattcatgaaagatagtctctaatttctttctctttagctttttttttttttttttttttgagatggagtctcacactattgcccaggctggagtgcagtggcacaatcttggctcaatgcagtcttgaccaccacaggctcaagccatcctcccacctcagcctctcaagaagctaggaccacagacgcatcaccatgcctggctactttgtgtgtgtgtgtgtgtgtgtgtgtgtgtgtgtgtgtgtgtgtgtgtgtgtgtggagtgttgctcttgttgcccaggctggattgcagtggtgtgatctcggctcaccacaacctccgcctcccgggttcaagcgattctcctgcctcagcctctcaagtagctgggactacaggtgtgcatcaccacacctggctaatttttttctatttttagtagagacagggtttcaccatgttggccaggctggtctcaaactcctgacttcaggtgatccgcccatctcagcctccgaaagtgctgggattacaggcatgagccaccacacctggctaatttttgtatttttttttgtagagatgaggtttcgccatgttacccaggctggcctccaactcctaagctcaagcaatctgaccaccctgggcctcccaaagtgctaggattacaggcatgagccaccactcccagcaagagatattttttatctggcttcagtaacaatgtaatgaatggcctcatggatttagaaagtgttctctctggccaggcacagtgtctcatgcctgtaatgccagcactttgggagaccaaggcaggcggatcacttgaagtcaggactttgagacctgcctggccaacatggtgaaagccaggctctactaaaaatacaaaaaattggctgggcatggtggcatgcacctgtaatcccagctactggggaggctgaggcaggagaatcgcttgaactcgggaggcgcaggttgcagtgagctgaaatcatgccactgcactccagcctgggtgacagagcaagatctcatctcaaaaaagaaaaaaagaaaaaaaaaagtgttctctcatgttttgttttgtttcggtttggtttggtttggtttggtttgagacagagtctcgctctgttgccaggctggagtgtagtggcgcaatgtcggctcactgcaacttccacctcccaggttcaagcaattctcctgcttcagcctcccgagtagctgggactacaggtgcataccaccacgcccagctaatttttgtgtttttagtagagatggggtttcaccatgttggccaggatggtcttgatctctttaccttgtgattcacctggctcagcctcccaaagtgctgggattacaggcatgagccacaacacccggcctcctgttctacttttttggaggatattgagaaacactggtgttgattactctttaaatgtttagtacaattcatttgtgaattgacaattcattgttggaaagttttgaaatactgatttaatctcttttcttgttataggtctcttgagatttttcattactgtttaatccagttaatttctgtgtttctagaaatgtgtccacttcatttaggttatctaactagttgtacaattaattgttcatagtatcctcttataatctttatttctgaatagtttgttgtagtgtgccccagtttcatttctaattttaattatttgcatcttctgccttttttgtcaatctaggtgaagtttttcaatgttatcgatcattgcaaagagtaacttttagtttcattgattctcattgaatagattcttatctattctccatttcacgtatttcccttctttattatttcctttcttctgttagattagtttactttcctcttttttggtagttcctcaagatataaaattatttataggtatttacagctataaatttcctactgaggccaggtaatgtggctcacacctgtactcccagcactttgcgaggccaaggtgagaagattgcttgagcccaggaattcaaagctgcagtgagctgtgatcatgccacagcactgcagcttgggggaccagagccagaccttgtctcaaataataataataataattttccactgagcactctcttcattgcatcctataagtttaggtctgtcctgtccatttttgtttttctctacatgttttcttttgtaatttgtttttgttgttgttgttgtttgtgactaacagaaatttttttcttatagctctagaggctggaaagtccaagaacaaggcacaagcagattcaatgtctcaggagggcctgcttcctggttcatacgattgtcttctcactgtgtcttcacatagtgcaaaaggaaaggcagctatctgggcctctcattttaaaattactttgttttttgatatgttttgagaaaggatcttgctctcttgggcaggctggagtagagtggcaaaatcacagcttactgcagcctcaaccaactgggctcaagcaatcctctcacctcaatctccagagtagctgggactacaggcacatgccaccatacccagttaattttttagaaaattttttgtagagacaggggttcactatgttgcctgactggtcatgaactcgcagcctcaagtgatcctcctgcatcagcctcccaacgtgctagaattacaggcatgagtcattgtgcccaacctaattgctttaattgacaaattttcattgtacatattaatggagtataaagtgatattataatttatgaatataatacagaataattaaacgaagctaattaacatatccaccacctcaagtacttattatattttgtggtaaaaacaggtgccttgtaatttgttcttgatctcctgttttttaagtgtgtgttaattcacacatatttatgtattttaatgtttttctgccattatagatttctagcttaattctgttgtgttctgacaggtactttatatatattcagtgcttttaaatttactgagactctgctgggtgcggtggctcacacctgtaatcccagcattttgggaggccaagagtggatggatcatttgaggtcaggagttggagaccagccttgccaacatggtgaaactctgcttctactaaaaatacaaaagttagccaggtgtggtggcatatgcctgtaatcccagctacttgggaggctgaggcaggagagtcacttaaacctgggagatggaggttgcagtaagccgaaattgcacccctgccctccagcctgggcaacagaacaagactctgtctcaaaaaaaataaaaattaaaaaaaataaatttcctgagactcattctgtggcatatacatttgacatatcctgaagatgttccatgtgaacttaagaatgtgtgttctcatgatatcagatggactgttctacatgtctctgaggcttagttggcttaccgtatttttcaagctatgtccttactgatcttctatgtagatgtccttttattaaaagtgtcatatataactctccaattattgctatagaacaatctatttctcccttaagttttgtcatataactttggggtctgtttttggtgcatgcatgtttatgattgctacatcttctttttctaatttttaatttttttaagagacagagtctcggctgggcacagtggctcattcctgtaatcccagcactctgggaggccaaggagggtggatcacaaggtcaagagattgagaccatcctggccaacatagtgaaagcccatctctactaaaagtacaaaaatcagctgggtgtggtggcacacacctgtagtcccagctactcaggaggctgaagcaggggaatcgcttgaacctgggaggtggaggttgctgtgagccaagattgcatcactgcactccagccaggcgacatagtgagcctttgtctcaaaaaaataaataaataaataaataaaagacagagtctcattatgttgcttacactgaacttaaactcctaggctcaagcaatcctcctgcctcagcatcccaagttgctagaattaaaggcatataccatcatgcatggcttattacatctcttgatgaattgaagcttttatcaatatattgccatcctttgtatattataaagtcttttacttaaagttcgtttgtctgatatcattatagtcaatccaattatcttttggttgctatttgcatggaatatcttcttcccatcctttcactaacagcctatctgttgctttttatataaagtgaatttcttgtagacagaatacgatttgatcatggtctttattatttcatccattcttcaacagcatgactttttcttggagtgtttgattcatttacatttaaagtaaaaataaagaaggattttcttcctgccattttgctatatgtgttctgaatgtcttatacttttagctccttatttcctccactgctgatttttttgtgtttacttgatttttagagtgaatcatttaactctcttctaattttcattgattttgttttgttttgttttgtttttcagacagtcttgctgtgtcgtccaggctagagtgcagtggcacaatcttgcctcccaggttcaagtgattctcatgtctcagcctcctgtgtagctgggactacaggcttgtgccactatacctggctaatttttgtatttttagtagagacagggtttcaccatgttggccaggctgatctttaactcctgacctcatgtgatctgcccacctcaccctcccaatgtgctgagattacaggtgttagccaccacaccaggctttcattcatatttactttctttctttctttctttctttctttttgagatggagtcttcttgctctgttgcccaggctggagtgcagtggtgtgatctcagctcactgcaaccaccacctcctgggttcaggtgattctcctgcctaagcctcccaagtaactgggattacaggtacgcaccaccacgcctgggtgatttttgtatttttagtagagacagggtttcaccatgttggccacgctggtctcgaactcctgacttcaggtgatctgcctgcctcagcctcccaaagtgttgggattacaggagtgagccactgcacccagccaaaactttaacagccctcataaggattacatttaccattccaaagttatattatttgaatttgtacctacttaacttcaatagcatacaaaaattctgctatacgactgcacgcttctgttgttttttttttttttgcaaaatatatctttatatattgtatgcctaaaacatacacttataatttttattgatttttaaaaaattcagtaaaaagtaaaaactggaattagatacaaaaataccataaatgtggttttatattttccaatatacttacctttactagagatctttatttctccacacagcttgagttactgtctagcatccttttattccatcctgaagaactccttttagcatctcttttatgtttatttgtttatttatttatttatttgagacagagtctcactctgttgcccaggctggagtgcagtggcacgatcttggctcaccaaaacatctgcctcccgggttcaagcaattttcctgcctcagcctcccaagtagctggcagtacaggcatgcaccactgtacctggctagtttttgtatttttagtagagacggggtttcactatgttggccaggctggtctcaaactcctgacctcgtgatccacctgcctcagcctcccaaagtgctgggattaaaggcatgagctaccacgtccagcagcatttcttgtatggcaagtgtagtggtaactgtccttggcattagtttttctaggaatgtcttaaattctccctcatttttgaacatttctggtgagcacagaattcttggttgatagtgtttctttttcagctcttaaatatgtcatctcaccgactatgtcccccatgatttctgatgacatatttgttattaatagtattgagaatcacttctttcagcactctttgtctttgccatttgacattttgatgatatgtgattcactgtaggcctgagtttctctttttttaatgttttttttttttgagatgaagttttgctcttgttgcccaggctggagtgcaatggtgcaatcccagcttactgcaacctctgcctcccaagttcaagggattcttgtgcctcaacctcccgagtagctgagaatacaggcacctgccaccacgcccgactgagtttctcttacttggagtttgttgagcttcttggatttaaagattcatgtctttcatcaaatttggaaagttttgcttaatatttcttcacattttacttcttcccctttatttctctgttatctttcttcagcttccataatgtgtatgttggtctgatgcatggtgtactacaggtcctttaagttctgtttggtcttcattctttttcctttagtcccctcagagttgatatttttcaaaggttctatcttcaaatttgtggattctttcttctgcatgctcacatcttctatggaagagaagatgcaaccagtgaccaaagaactaatgttaggagtttggctttacaaagaaaatagctccatgttatcttatttagaattggtaggtattttatttagaaagtattttgaaaagaaagtaaaaaaggatataatctagaaagaaaagtacagaaaactttacaaagaacactaaataaaaacgtttaaaaggaattaaaacagttccttctctgagaataaatgaaaatgtgaataaatggatagacaatgaaaaggtggaaaatctcatgtaatagtgttttttatcttctgccacagaccccagaggactgagcaaaggaggatgaacacaggaataaagacaaagataaaaagatctgttttaaaagaaggggtcagggggctccttgcttctagtgaacaagggccctgagcttctagagccctttgtatttattgagtaaaggaaatagggaggagcaggtgatcatgagccagttgcatgatttagtgcaggcctgcatgtctgctttccttgaacagtaggctccagatattccagtagataacctcaaggtgcacagtgccagggagtgattgccctcagcctaccttctggtggcaggcacagatgtgagtttgcccacatcctgcattcatgataaacagtttgctgtttgatcatatagcctccaatggaatgctgagttggtcatgaccctcaggttttcagctcccaatatctccccctttctgtttttgcattaattgaatgaatgtaaggccaggttgggcagctctcattttctgattggcagtccatccaattttatagactatgaacagaaaacaaagacagaacagcattattcccagaactatacatgagatgttaatgtggcgctttagataggtccaaggattgaggctctccagacctcactggaatttggtccaggcttctaaagaaggctgaaactcttgagtttgcttatttaaaccaataattttgtttcataattcaccaatatcaaaggcgatattggatgtgaaagctccctgcaaatgggctttcacaaggtcccatggatactcactttggttatattctaagttggttacacaaatatgagtgtgattaaaatgacagcacaattgctgttgcaattgtaagctttgtacttgttgccctaaccatggaaccatggatttcaacattgccacttcagtttgtaactcagtgttaattttactctgaagtagccatattttcttggtggtacatgtctagttctccacgtactgagctgtttgaacagaactatgcaaagctacagaggacattactacagaagttattagtgtgaccaaggaaataatagcaaaaattatcatgcctaagactttacgggtacaatgagtaagctgagttagaagtttcatgaagtgcaaagcaggggtggaggcccaaggctctgacagattaacaggaatccatatcccagggatgcgacccataattatcaaggtagagatgtgtttgcaatgtgctatgattaatgcagtgatataactgacaagatttacaggtcaattgggtattgtttacctggagctggtccttcttagctgccataaagacataaggattaaaaacacaaaccgtaaatttagtggtgatactctttacaaatgtaacatcaaaactgtgtcgagtagcagtactagtattagagagtacccctacccagatagtaccatttgtaaatgggactgctgctttccatattgtttcttgaattggacctttcctacctagatattgccactgaagaagaggcgggataaagcctgttccatgccaagcaaccctggcagcagaatgggattggatcctggtgtggtgtaaagaagaagcattgaaagtctgctaccaatgacagtgaagtttgtgccatgatgtctgattttatctttaccatctagttgacctttaggtccccaagtcacaatgtcttcagttaacatagattgttttctagccagtgggccaagacattgggtccatggagcggggtaggaactattgaagggaatccattccatatagtcaacacaattggggtgattgggccgggaatggttggttagcacaccagttacattaatagaactaagacctaataagcacatgacttttccatggtgactcaaccatgcttgagcttgaattgtaagacagctactacagttgagcaatatctttgtagtgatacaccaggggagtccttccagtggggccatataattgatgacattgttctgagagtctaactgttctatgtcaggaggagttagaggtcctggagcccatgctccctgatcatgatagatctcagggggagtgccactccaaagtacaagccatactactaggggattagaaacatatgcccaatatgtttttgcctctgcagagagaaaacataccacacaggacattatggctaacatggccaagaacatggattcaggggtttttgcctggccctgacgctccagcattttctcagcttcctgcgtggttttcttgagttgccctcaggttatggggtttgatgtcctcgtgactccggtcagccttttctccatcttcacactcaggctcagctggctcatggcccataccggagggaccaggcccatggttggccgccatggatccctccagtctcctgttccatggttgcatgcaccttgaggacacccaaatggtttgtccatctcctgtaaaaacacaagcataccctcatccccatgtcaataagtccaccaggcctttccattgtccttccagggatttccataacactttcagaagaactttcctctttttctctaacacttgccaatgtctttctgctggagtcttaccaccaataccaggagtcaaaaaatttaaagtaaatagggctaagtgtagttttgtttgaggtagtagctggtctgctattccctctttctgttttttcaacatgcattgtaatgtttgatgtgcctactctataattccttgtcctcaagggttgtaagcaattcctgttttgtgagtaatagctcaaagctgtaggaaattttgaaaagcattactagtataagcaggtccatttgccaagaccagctcggtcagggagacactaatccagcggtgctagaggaattaaaggcacacacacagaaatatagaggtgtggagcaggaaatcagggatctcacagccttcagagctgagaacctcgaacagagatttacccacatatttattaacagcaagccagtgataagcattgtttctatagattatagattaactaaaagtattccttatgggaaacaaagggatgggctgaaataaagggatgggtctcactagttatctgcagcaggagcatgtccttaatgcacagatttttcattctattgtttgtggtttaagaacacctttatgtggttttaattggtagcaaccaattaatgtcccctaacaattgtcaaaaatcatttaaagtctgtaacctgtctttacagagaaccattttctgaggccgtacactcctctccataacaatagttcctaagtaatggtatggggaagttgtttgcactttctctggagcaattttgagcttccatttaacaagagcttgctttacttctctcaataattgatgcaatatttgatctgtaggtgcaaccaaaagaatatcatccatgtaatgaatgatatatgcagtgggaaacatattttgaggctcttttaatgctctttgcacaaaatgctgacataatttggtactgttaagcacgtcttgaggtaaaactctccattaataatgagaaacaggttctttttttattaatagaaggcacagagaaggcgaatcaaggcttatctttctcatgtaatagtatagtaaagaaacaatctttaagatctgttactacaagaggccagtcccttgggatggctgcagggatggcagaccttgctgtaatgcacccattggtttaatctgtgcattagtagctcccaaatcatgtagcaatcaccatttccctgacttctttggaattacaaatactggtgtattccagaagctaactgactcttcaatatgtcacgcatctaattgctcttttactagctgatggagttgagctagtttctcctgtgataggggccattgatccacccacacaggtttgtcagtcagccattctagcaacaaagcagtggggagaggagaaatattaatgactccaatcataaatcctgatgtccctatctttttctgtctttccagttattgatatcaggttagggtttccttgtaggaatttttctaaacctttcccattctgatatcccatgtctttcaacattttaaatcctgggttatcaacgtgttcatttgtaggtcacatatcccaagctgtaagtaagtctcgaccccataaattgatagctatatttgcaacataaggctggaaagtacatgattgtccatccggaccaagacaaggtaaaatctcagcactctgttgaatgctttgagcagctcctattcccactagggatgtggaggttcatctgaggggccaagatggaggccaatccttactagatattactgacacatcagctcctgtatctacaagctcataaaatttttttcctttaatttgcactacacaggtgggtctattagaggctatgggttgtgataaatagatttctcatgcagttgtgctctcaaatcctttatttcctcatttctcctttcatggagaagggtgtaatttgcaggggataggcaataattgcactatatatgcacctggttcaaaaacccaaagatcttgtgacattaaaactactttaatttctccttcataatcagagtcagctactctggggactacattgatgccttgcaagttaaggcagctttgcctaaaattagtcccatgtatcctgctggtatatgtccccaaatgccaggggggactttggtaggtttgtctcctccaattagtgtaattctttctctggcggagagatctaatcctgcacttcctggtgttcctggggaaagggaatcaatatttgtcctgggacccacccctgaagtggggttgtggtctgaactgggaatgccctcattgtttgaggggcccaggtccaggcccccttatcgtttcccaacaggtggggtgccattctgatgaaattttgagtggcattgattagcccagtgatttcctttgtcacagcgaggacagagtcctggcattttttctgctggaaaggacaccacattgtaaagtcctttcttttctgagatctggtggcattcctttttaaaacttccagtttttccacaattttaacattttcccactttggggtttgacccttggctccctttagatttgtcaactactaaactagccattgcttgagctaacattgtagaatgatgattcagttcctacaccctgaaaggctttaaggtaattccccaagctctttgtggatctcagagcagccattgcatgcttgcaatctgcattttcattttcataggctagagttatggtaagcatttctgtagcagaggcctgagggacctgatgctgcactgcctcttgcagccacgtgataaattgtccataaggttcccatgatccctgcatgacaagtagaaaagactgcactggaactccctcttcaggaattgtgctccaagcatgcttagcggctaaggcagactggaggtaagcggtctctgggagtgttaattgttgtaccagatctgaaaaggggtcacagcctgtcagcattttctctgtagtgtttccttgaccagaggcatgattctgcccagcctggtctgtgcacatttcttgtcaatttaaactccatgcgagatatgcactgacagataagcaagtgcgagccaaatgttttatatcaaagggtgggaggcgcatggctccaaacactgatactaacagccttatagtaaacaggctttgcaacccattattaaccacactagcttttaattcttctagtaatttaaactctacaggactgtgctcatgtaaaagatgttgcagatcattcggatcaggccttacagtaataggaaaactgcaaggtcctaaaggttccccagccgtagcagcagcacacaaaattttttgtacatgggtttctacttctgttactggatggggtggcagaggtcaattctcctctcctatttcctgcttagcaaacagccaattctcctcccctttctcctgctcattattttcaataggcactgtcagagaaacaaatgatgtttttaattcttgagactcagaacctgactcctgttgtctgacagaataagaagacaatggcagtaggaccatgtgaaccaaaacccaagcagaaaaaacagaagggtctactttgagacattttgatgagcccatttcaatccctcttctactttgtcccaattttctacattgagagtgcctgcctgcagaaacaatgggttatgtgtcataacctcctgcagaagcctagttaatgtctgtgaattaacttgagctccaggctgtttcaacagaactttaagcaattgcacataatgtttttcttcaacagacaaattctgccccatgttaccctgattcagaacttcccattcccagcacttctttagagcactgaccttatactccctgctggcagatttgtccctaggtcctcgttcatcttgttagcttcacttcctctgctccagcagaccttcttcattcacgtccttgaagtccctgttcatgatgccactttgccacagaccctggtggactgaacaaagggggacaaacagaaataaagacaaaaacaaaaatatctgttttaaaagaaggggttgggggctccttgcttctagtgaacaagggccctgagcttctagagcccttcatatttattgagtaaaggaaatagggaggagggggtgattgtcagtcagttgcttgatttagtgcaggtctccatgactgctttctttgaacagtaggctccagatattccagtagataacctcaaggagcacagcaccagggagcgattgccctaggcataacttctggtggcaggcgcagatgtgagtttgcccacatgctgcatttatgataaacagtttgctgtttgatcatatagcctccagtggaatgctgagttggtcacaaccctcaggctttcagctccccaaatttttcactatagagaattcctttatgtaaggaattacttctttcagcactctttgtctttgctatttgacattttgatgataatgtgactcactgtgggcctctctgagtttctcttacttggagtttgctgagcttcttggatttagagattcatgcctttcgtcaaatttggaaagttttacccattatttcttcacattttaattcttcccctttatttgtctgttatctttctccaatggcttctcactagacaaggttatcccacacaatgacacttttctgcctggggctcacctgtacaggtgacttgaaggattcctctcttctctgacctcaccattttgtgctacaccttcttaatcatactacatttgcagagctgataccctgctcatgggacaagacacaggatgtgggagtcatgagtaggagacaagaactttgcataaaaagaattctaacactttggatttaaagcgttctgaagatagacaagtccaattttagaaacagcaaaataataagagtagaaaattttcacaaggactcaaaagcaaataccctcactcactaccccatatagaactaatccttgaaaaccataacagagaaaatgaaatccgtgcaatgaacagatttttattttcctgggaagtcactagactgcctcacaaggacaggaaccatccattttgtgttcaccactaacttgccattattatggcaaatcttggaacacaagacatgcttaagaacaactatttgctgcattacgaaagaagaaggaacaaggccagcctgctccatcaaggttaagtttctaaagttctccagcaacatgtctctgtacaggttttcccaaacaaagtccagtaatacccactcctccaacaataagtctactgccatttacttgaaggtcaaggagttctaaaacatcactcatatattctggctcaggcaatgagcatcttcaagaatgtaccaggatggatatcgcaggaggatgatggatgggctggtagcactagggaaggagactcaaaacaggaattcagacatgttcttgaggccacttattatctgccccatgactaacttctctcctcttttacccacagacactgaaccaccttctagatagaagctttaatggcttcactagcatatagttgacctgatttttccagtatgttgtaaaaactcatccagtggccaggcatggtggctcatgcctgtaatcccagcactttgggaggctgaggtggttggatcacctgaggctgggagtttgagaccagcctgaccaacatggagaaaccccatctttactaaaaataaaaaattagcctggcatggtatctcatgcctgtaattccagctacttgggaggctgaggcagtagaattgctcaaagctgggaggtggaggttgtggtgagccgagattgcactattgcactccaccctaggcaacaagagtgagactccatctcaaaaaaaaaaaaagggaggggagtaggggagaatgaatattgagaagacaactagctattatttgacctgcgaggtcagagagaattttcttataaataagaataaagaggccaggagtggtggctcacgcctataatcccagcactttgggaggacgaggcaggtggatcacgaggtcaagagatcaagaccatcctgaccaacatggtgaaatcccatctctactaaaaattagctgggtgtggtgatgcacgcctgtagtaatagctgtagttccagctactcaggaggctgagtcaggagaatcgcttgaacccaggaggtggaggttgcagtaagccaagattgcaccactgcactccagcctggtgacagagcaagattccacctcaaaaataaataaataaaagaataaggaagctgagcgcgatggttcatgcctgtaatcccagcactttgggaggctgaagtaggtggatcacctgagttcaggagttccagacatgcctgtcaccccaatatggtgaaaccccgtctctactaaaaatacaaaaaattagacaggcatggtggcacgtgcctgtaatcccagctactcaggaagctgaggcaggagaatcacttgaacctgggaggcagaggttgcagtgagctgagatcatgccattacactccagcctcgacaacaagactaaaactctgtctcaaaaaatatatataaataaaaataaagggccaggcgcagtggctcacacctgtaattccagaactttgggaggccaaggtgggcagatcacgagatcaggagatcgagaccatcctgaccaacatggtgaaacaccatctctgctaaaaatacaaaaattagccaggcgtggtggtaggcatctgtagtcccagctactcgggaggctgaggcaggagaattgcttgaacccaggaggcagaggctgcagtgagctgagatcgcgccactgcactccagcctggacaacagagcaagcctcagtcttaaaataaaataaaataaaataaaggccaggtgcagttgcttatgcctgtaatcccagcactttaggaggccaaggcaggaggctctcttgaggccagtggttctcgaccagcctgtgcaacatagtgagacccccatctctatttttttttttttttgagacagaggctcgctctgtcgctcaggctggagtgcagtggagcgatattggctcactgctagctctgcctcccagtttcacactattctcctgcctcagcctcctgagtagctgggactacaggcaccccacaacgcctggctaatttttttgtatttttttagtaaagacagggtttcagtgtgttagcaagatggtctcgatctcctgacctcgtgatctgcctgcctccgcctcccaaagtgctgggattacaggagtgagccactgtggccggccccccatcatctctatttttttttattttttttttaaagaagaaatgcgaccgctgagactgcatctatcccgcgagcacaaagccttgccctggccactctgccgcctatacacgcccgctgtcagctcaccatggatgatgatattgaggtgcttgtagttaacaatggctccggcatgtgcaaggtcaacttcgtgggcgacaatgccccccgggccatcttcccctccatcgtggggcatctgaagcaccagggcgttatggtgggcatcggtcagaaggactcctacgtgggtgaagatgcccagagcaagagaggcaacctgaccctgaaataccccatcgagcagagcattgtcaccaactgggatgacattgagaagatctggcaccacacctttttttttttttttttttttttgagacggagtctcgctctgttgctcaggctggagggcagtggcgcaatctcggctcactgcatgctccacctcccgggcttatgccattctcctgcctcagcctcctgagtagctgggactacaggcacccgccaccacacccgactcattttttgtatttttagtagagatggggattcactgtcttagccaggatggtctcgatctcctcacctagtgatccacccacctcggcctcccaaagtgctgggattacaggcatgagcctctgtgctcagcctggcacgacaccttctacaatgagctgcatgtttctcccaaggagcacccggtgctgctgaccgaggcccccttgaaccccaaggccagccatgagaagatgacccagatcatgtctgagaccttcaactccccatccatgtatatagccatccaggctctgctgtccctgcacgtggcctccagcttctccctgaagaagagattccagctgcctgacagccaggtcatcaccatcagcaacgagcggtccccgctgtcccatggcacttttccagccttccttcctggacatggaatcctgtggcatccatgaaactaccctcaactccatcatgaaatgtgacattgacatctgcaaagacctggatgccaacccagtgctgtccagtgacaccaccatgtacgctggtattgctgacaggatggaggaggagatcaccaccatggctcccagcatgaagaagatcaacatcattgctcctcctgagcacaaatattctgtatggatcagtggctccatcttggtctcgctgtcccccttccagcagatgtggatcagcaagcaggaatacgaggagtccggcctcagtattgtccaccctaccacaaatacttctaggcggacggtgacttacattataacctttcttgacaaaaacctaatttatgcagaaaataagattggttttttttttttttttttttggcttaagatttaaaacctggaatggtgaaggtgacagcagttagttggagcgaagaatcccaaacgttctacaatgtggctgaggactttgattatacattgttctttttttaaatagtcattccaaatatcgggaggtgcattctcttttttgtttttttgagacagagtctcactcagtcgcccagactggagtgcagtggtgcaaattggcacagtgcaacctccgcctcccaggttcaagcgattcttctgcctcagcctcccaagtagctgggattacaggtgcaccatcacacccagctaatttttgtatttttagtagagatggggtttaaccatattggcaaggatggtctcgaactcctgacctcatgatccacctgcctcagcctcccgtgctggcattacaggcgtgagccacctcgcccggctgggaggtgcattcttactggaagtcccttgccctcccaaaagccaccccatttctaaggagaatgcccagtcctctcccaagttcacatggggtggtgatagcattgcttttgtgtaaattatataaaattttttaaatctttgcctttgtatttttaattttgaatgatcagccatcatgtccccccatttttgtcccccaacttgagatgtataaaggctgttggtctccctaggggtgggtggaggaatggaggcagccagggcttacctgtacactgacttgacagcagttgaatgaaagtgcacaccttaaaaaaaaaaaaaggaaagaaaagaaattccatgtagacccatggtatgaccaattatcaatgacactagagaggactatctaaaagcatctattaataatccctcatgacagccaggtgaggtggcagaggttgcagtgagcagaggttgcacccctggactccagcctgagtgacagagggagactccatctcaaagcaaaaccaaaaaatccccaagttttgcagaatctggattttatggaaaaaaaaagaaaaaacaaaaacaaaaaaacttatcttggcagttaaacacacgctcactgttaaatgaacatataatgcaaatgagaaagtgtttacaactgcagtcatgaagaaagtgctaatttataaaatgtgcataacagaacaagtaatatattcagaaactctttcaaaaacaaatttaatcacataaaaccaccacagaaaactaaggggccacacgtcttatctgagaataggacaaacagaaagacaatttcatcttcatgtcatttatttgaatgtatccccaaaatgaattatcttatttgcaacaagagtgatacagaaaggcttccagagctgggcagggtgggtcatgcctgtaatcccagcactttgggaggctgaggtgggtggatcacctgaggttgggagttcgagaccagcctgaccaacatggagaaaccccgcctctactaaaaatacaaaaaaattagccgggcgtggtggcgcatgcctgtaatcctactcaggaggctgaggcaggagaatcgcttgaacctgggaggtggaggttgcggtgagccaagatcccaccattgcactccaaggctggatgcctggagaaacccagtggacacattcagctttcagcttattccaatcatgactgaagaggcccagccagaaaataagggtccccttgagccagcagcttagcttcaggtggagaaatgcatgataaaattatgataaagtttttccaaaagatgtagctgccaataggtaaagccacaaggctgctaatgtcaggctgctgcactcattccgtttccatttctatgtgaccagcgaagcttactgggacattcccttgctggtcactgaattctttggagatgtcaagcattcagtttcagaaagagattagtactacgtccctatctgatcttttttttttttttaagaggcagagtcttgctatgttgccccaggctggttgtgaactcctgggttcaggtgatcctcctgtcttggcctcccaaagtgcggagattacaggcatgagccactaggcccagcccctacctcaccttcttctttttttttttttttttttttgagatggagcttcgctcgtcgcccaggctggagtgcagtggcgcaatcttggctcactgcaacctccacctcctgggtttaaacaactttcctgcctcagtgtcctgagtagctgggattacacatccccaccatcatgcctggctaatttttctatttttagtagagatggggttttgccatgttggccaggctggtcttcaattcctgtcttggcctcccaagtagctgggattactggcatgcaccacaacacctggctaattttgtatttttagtagagatggggtttcaccatattgaccaggctggacttgagctcctgacctccagtgatccacccgccttggcctcccaaagtgctgggattagaggtgtgagccaccatgccaggccccctacctgaccttttaaagaagggacatgcttggtggctccgtcaggcagatattatggcgtgtgaaatatctaagggttgtatcccacttttccccttcccatggcttcacagcaatttacaatgcacaaaagaagccttatgaatgaacaaaggtgattccacttgatttacaagcaggtttctctccactgagtttctacaccttctataaggtatgaagtttttaaaagccctgccacgttccttttgtttctcttatttttcagtcaactttttcttgagacagggtctcattctgttacccaggctggagtgcactggcacaatctcggctcactgcaacctccacctcttgggctcaagtgatcttcccacctcagcctcctcagtagctgggactacagacgcacactaccatgaccagctaatttttgtacttttgtagagatgaggtttcaccatgttgcccaggctggtctcgaactcctgggctcaagtgatctgcccgcttcagccttccagagtgctgggattacaggtgtgagccactatgcccggcccacattccttatgatggggcttcaatccactctaagctcttccattttgtgcaagatcacgttctttgatttcatactacaagaaacctcttctttgtattcttttttctcatgtgagttttataagttctttcaccagatgagttcggatgctctaagggataataaaatggtttttcacatgccttagattcactgaaatggtctcctgtgtgatttcttacatttagcagaccaaagattgaaaagaggccaggtgtggtggctcatgcctgtaatcccagcactttgggaagccaaggtgggcagatcacttcagaccatgagttcgagaccaccctgaccaacatgatgaaaccccagctctactaaaaatacaaaaattagctgagcatggtggtacgtgcctgtaatcctagctactccagaggctgagagaggagaaatgcttgaacccaggaggcagaggttgcagtgagccaagatcatgccattgtactcaagcctgggcaacagagggagactgtgtctcacacacacacacacacacacacacacacacacacacacactacacagacagaaaacatttcattccttacattcataaggtttctttccattgtaactctgaacatgaatattaaagactatggaatatctaaaggttttctcacattctttactgtattattttgatagagttgaccaaaaaaaggaaccccacacattgaatggcttaaacaacagaaatttatttgctcataatttttgaggctggaagtccaggatcaaagtgtagataaggatgatttcctctataatgagccttaaaagaaggatctcctccaggaatctctctttgccttgaaggtaaccatttccggtcacttcacataaaattctgtgcctgctaccctggtatctctttcacttcttataaggaaaccagtcatattgaatgagggccccattctaactgcctcattttaaaatcacctctttaaaaaaccacatctctaaataccaccattatcttgaggtcccagggatgaaagccttaatgttaatgagtggatgggacatgtgacataatctaaatcagtggtcccctaactttttggcaccagggaccagtttcgtggaagacatttttcccacggactggagttggggattaaactgttccagttcagatcatcaggcattagattctcataaggagtgtgcaacctagatcccttgcatgtgcagttcacaataaagttcatgctcctatgagaatctaatgccactgctgatctgacagaaagttgagctcaggcagtaatgtttgctcatcctacattcacctcctgctgtgcaccctggatcctagcaggccacagaccagtaccagtccatggcccaggggtttggggatccctgacctaggccattccacttattatagtcatcaagttattctccagcatacattgcatatgaatattaaagcttgtggaacataaaagggttttcccacaatccttgaattcatagtttctctccagtttgtgttctaaaatgtttatcaaggactaagtggcaggcaagggctttcccacattccttacatcaatatggcttctctccactgggaatcctgacatacactttaaggcttgagaaataagtgaagattttcccacattccgtataaacataggttttctcctagtgggagttttgtggtatcagtcctatggattaaatgaagcctttcccatattttccatttacatagggtttcctgccactgtgaattcttacaagttcattatgacctgagataataaagaagtggttccagattcccaactctcacagcatttttctacaatgtgactgttcacatctttcatgtaaatgggaacaacagagagctttaccacaattctaacattgataagatttctctccagtgtgagttctttaatgacatggaaagggactgtaagaattgaagaactggctgggcgtgatggctcatgcctgtaatctcagcactttgggaggtcaaaccaggcagatcactggaggtcaggagttcgagaccagcctgatcaacatggagaatccctgccttcactaaaaatacaaaattagctgggcatggtggtacatgcctgtaatcccagctacttgggaggctgaggcagaataatcacttgaacctgggtgatagaggttgtagtgagccaagattgagccattgcactccagcctgggcaacaagagcaaaactctgcctcaaaaaaaaaaaaaaaaaaaaaaaaaaattcaagaatttatcatactacttatattcacagggtttctttaccatgtgagttcatatacttgaaatgaatttaaataactaggtttttcaacattgctttacattttcagggtttttcttcagtgagtttgtatgtggatattaaaaaggaaggattggctgggcgcggtggctcacgcctgtaatcccagcactttgggaggccgaggcgggcggatcacgaggtcaggagatcgagaccatcctggctaacacagtgaaaccccgtctctactaaaaatacaaaaaattagccgggcgtggtagcgggcgcctgtagtcccagctactcgggaggctgaggcaggagaatggcgtgaacccgggaggcggagcttgcagtgagccgagatcgcaccactgcactccagcctgggcgacagagcgagactccgtctcaaaaaaaataaaaataaaaataaaaataaaaataaaaataaaaaggaaggattatataaatccttttcaacatttcttatgctgaaagggcatctctccagagtaaattttcacacattcaataaggtttgagtaactagtgatggcttctctatattccttacattcatagggctctgtccaccatgagttcatgtttaagaaaggctgagcattgatgatgggtttttgttgttgttgttgttgttgttgttttgagacagagtctcactctgtcacccaggctggagtgcagtggcgtgatctcggctcactgcaagctccacctcctgggttcacaccattctcctgcctcagcctcccaagtagctgggactacaggtgcccgccaccacacccagctaatttttttgtatttttagtagagacggggtttcaccatgttggccaggatggtctcgatctcctgacctcatgatccacccacctctgcctcccaaagtgctgggattacagggttgagccactgcgcctagccttttatttatttatttatttttttgagacagtgtctcactgtttcccaggctggagtgcagtatcacaatctcggctcactgtgacctccacctcctggattcaagcaattcaggctggtcatgaactcccaacctcaggtgatccacctgccttggcctcccaaagtgctggtattacaggcataagccaccacacctggagttttagtcagagcttcagtgacctggaggaagggaaatatccaactccagccaactctatacatcctgacccaactaaagggtgggaaaaactgaagttcacagtgcagaagcacagactcactgcaagactgacatctaatccctggacaatagaatgctgcccctctccccacagcttatcatgattactagaggcctgcttacagcatttcctcttatccagtatgccatgtccagctaaggaaaaattacaagcatactaaaaggcaaaagttagtttaaagagaaagagtaagaaccagaaccagatatagcaggattgctgaaattatcagactgggaatttaaaacaattatgattgatatgccatgggttctactggataaagcagacagcatccaagaacagacaggcagtgtaaacacagagatggaaattctaagaaccacaaagaaatgctagaaattgaagacagtgtaacagaaatgaagaatgtctttggtaggcttattattggccaagaaacagccaactaaagagcttgagaatatatcagcagaaacatccacacctgaaaagcaaagagaagaataaaaaaacaagatataagaactgtgggataactacaaaagatgtatcctacatataaaggaaataccagatggaaagaaaaaaaaagggaaacaatgacagaatttctcaaaattaactcagacaccaaaacgcaaatccaggaggctaagcaaacaccaagaaggacgagcaccaaaaacctatacctaggcatatcatttaaaaataacagaatatcaaagataacaaaaaattttcatagaagccagagggggggaaatgctttaagtattgaggatcaagtataagaattacatccaactttgagcatagaaggaagaagtgaaggtaaaataaaaatgtttatttttctaatacttaattgatctgataacttctgaaaaatagctacaatgtattagattacatatgctaatttgtgtgtgtttataggcataaaagtgaaatatagtaatgatggaaggtctgagagggaggatttaggattattttgatagtataaggtactaacactactcaagaaacggtacagtattatcagaattcatgtacttattatggcatgtgaaatatttaaaggttataccatattccttaccttcccagggttctgaggtaattttacatgtgtaaaaaaaattctgtggaattaatgtaaggcttcctacatgcattacaggtaaaaggcttctctccagttcgacttcttacaccttctagaaggtagaaaacattaatgtaagcttttccacaatcctaatgggatttcagtccactccaagttccagtatggtgtatggggtcacattccttgcgttcacagtaaaagaaactttctttccttttttctcctctattttcacatggtctacgaccagacaacttgcatgtgaatattaaaatatagtgaacattcacaggctttttcatgctccttacattcatacaatttctctcctatgtgatttctcctgtatgtagaaaggactgaagactcaatgaaggctctcccacgtcttacattcatatagtttctctccagtgtggctttgcatgtgaatattaaggcttttggacaatctataaacgtttttgcttattgcttactgtattcacttgctagagccaccacaacaaaataccacagactgggtggctcaaacaagagaattttatttgttcaaagttctggaagcccaagatgaaggtgccagcagggttggtggctttgatagaaggatctgtcccagtgctctgtctttggcttgcagatggccatcatctgatgacttcacatcatcttctatttgttgtctcagttgtgtctttctcttcttatagggacaccaatcatattggattagggatgtactctaacagactcaatttaatcaaataattttcttttttttttttttttgagatggagtctcactccatcgcccaggctggagtgcagtggcatgatctctgctcactgcaacctctgcttcctgggttcaagtgattcacttgcctcagcctcccaagtagctgggattacaggtgcccaccacacctggctaaattttttgtattttcagtagagacaaggtttcaccatgttggccagggtggtctcaaactcctgacctcaagtgatccacccacctcagcctctcaaaatgctgggattacaggaattaagtaattttcatgcagcttcttctctccagagtgagttcattcatgtctttaaagtgaactggaacaaatgagagctttcccacatttattacatggacagtttctcactagtgaatttgttcatgtcttcgaagtgaacggggatgactgtaagctttcccgcattgctgacatttatagggtttctcttctgtgtgagttttttcatgaattctaaaggaactggaacacgtgaaggctttcccacactccttgcattcatagggtttctctccagtgtgagtcctttcatgtatttgaaatgaactggaatgactgaaggcctttccacattgtttacactcatagggtttttctccagtgtggattcgcatgtgaattttaaggtgggtggaatagttaaaagccttcccacattccttacaggtgtatggtttctgggcactgtgcgttcgcatgtgattattaagacatgagggatacccaaatactttcccacatatcttacactcacaggccttctcttcagtgtgagttctcaaatgtccactaagatttgaggaaactgcaaaggctttcccacattcaacacatacaaaaggcttctctccagtgtgagttcttatatgttgaataaggcgtgaggatgtaaggaaggatttcccacattccttacattcatagggcttgtctccactgtgagatcgtacatgcatactaaggcccgagtactgagtgaaggctttcccacattccttacatacatagggtttctctccagtgtgagttcttccatgtatctgaaatgagttggaataattgaaggctttcccacattccttacattcatatggtttctccccagtgtgggttcgcatgtgaatactgaggtaggctgggtatctatagccttttccacattccttacatttgtagggcttttttgcattgagggtttctataagcacagaaaggcttgtagagtcaataaaacctggcccataattcctccattcgtagagtttttctccattgtgagttctcatatgtgcctgaaggtatgactcattaatgaaggattttccacagtgactacattcaaatgacttttcttgtgtgctagttctctggtatacaatatttggtgtcaggctgaagattttttcactctgattaaactcagaaagtttctcaccagtagaggttttctcacacagggtaaggaaatcttttccatactgattacagtcatgagtgttccctgtactttgagttctcacgtgcgtcttaaggcatgagtgttcactgaagacttctccacattgctcacagtcacagagttcccttccattgtgttttccttcctgttgaagggatgatgatgatttaaggatttttctcaaacatattaacagaacatacccatctgaagctagaaacattataatggtgattataattgatgccatttttattacatgcattcaggtccttccctgtagatttattttaagtggtatgacttaactcttattctagaatgttgtgccatctactttaatcttggctaggcatggtgtctcatgcctgtaatcccagcactttgggagtccgatggggggcagatcacctgaggtcaggagttcaagaccagcatggccaacatggtgaaaccctgtctctactaaaaatacaaaaattagctgggcttggtggcacatgcctgtaatcccagctacttgggaggctgagacacaagaatcgcttgaacctgggaggcggaggttgcagtgacccaagatcacaccactgcactctagcctgggcaacaaagcgagactccgtctcaaaataataataataataataataacagatttctgtagaattcaatgtctagatgggtgcagtagctcacatttgtaatcccagcattttgggaggcaaaggtgggtggatcatttgaacccaggaattagagaccagcctgggcaacatggcaaaactccatctctataaaaaatatcaaaaaattagctgggcatggtggtgtgttcctgtagtcccaaccacataggaggctgaggtgggaggatcacttgagccaaggggtcaaggcttcagtgagccatgtttgtgccactgcaatccagcctgggtgacacagcaagaccttgtctcgaccaaaaaaaaaaaattcatagtctaagccagatgtggtggctcatgcctgtactcccagcacttttgtaaactgaggcagaggatcacttgagcacaggagtttgagactagcctgggaaacacagtaagaccctgtctccacaaaattttgaagaattagctgggtgtggtggtgcatgcctgtagtcccagctaccaagggaggctgaggtgggaggatcgcctgagcccaggaggtcaagactatactgagccatgattgcaccactgcactccagcctgggtgacagagcagtatctcgtttcaaaaaaacaccaaaacaaaactcaacgtctagttacacttgtgggaatgtgtgaaagctccaaagaaacaagtttcacaattggagcatccctaaattctttgctccctctcatgtgtatgcaacttctctcaaatatctcttatttttgctgacttcccataacagaattcctgattttctctgagggtggaaaataaaaaatatcctatgcaaatcttaccaattgtatcccaatggatgtctgacccctcaaaaagtcctgctgaagtatagaccactgggtttcaagtcgcatttcccatcctgaaataaaacagacaaacaaataaaaggactcaagctaggcacagtggctcatgcctgtaatcccagcactttgggaggctaaggcaggtggatcacttgaggtcaggagtttgagaccagcctggccaacatggcaaaaccccacctctactaaaaattcaaaagctagctgggtgtggtggtgagcacctgcaatcccagctactcacggggctcaggctggagaatctcttgaatccaggaggcagaggttgtaaggagctcagatcacaccactgcactccagccttggcaacaaacagagtgaaccacaacaagaacaaatgaaaggatttggagaaagaaatgcaaagagttcaaaacaatatggcttatttctatttgtttcaaattaaacatggcaagaaaaagcagaaagacatttggggatttgggctatatcaaaaatttggttttgatgtaaatgatccaaagggggaaaaattggccaagacaaggacatggggtaaaacttttcgatcgtttattacaaattgatgctatgaaaattaaaactgatagtgaatagagagaatcagggaatgaaagtaggaaatttctgaaaaaagagcgtatatctaaacaattaacttggccgggcacggtggctcatgcctttaatcccagcactttgggaggccgaggcaggcagatcacgaggtcaggatattgagattatcctggctaacacggtgaaaccccgtctctactaaagatataaaaaaattagccaggcatggtggcaggcacctgtagtcccagctacttgggaggctgaggcaggagaacggcataaacccgggaggtggagcttgcagtgagctgagattgcaccattgcactccagcctgggcgacagagcaagactccatctcaaaaaacaaaacaaacaaacaaaagccacaattaacttaaagaaatgttctaagaccccaggtggatgcctgaatcatggctagttctgaaccctgtacatactatgattcttcgatctggtaactgagatgaccgctacgtgactcacaggtggtgtacacagtgtagatacattggacaaaaggatgattcacaccccaggcaggatgacataagggttcatcatactactgagaatggtgagaaatttaaaacttatgttttgtttatttctggaaatttttctttttttcttttttttttttttttttttgtggggtgggggtcagtggccagggtctcactctatcacccaggctggagtacagtggtgcaatcacatctcaccacagccttgacctcctagtctcaatccatcctcacagctcagtctcctgagttactgggacagcaggtgcgtcccaccaccctcggctaatttttgtattttttgtagaaacaaggttctcggtatgttgcccaggctggtcttgaactcctgggctcaatgattcacccacctaggcctcccaatgtgtggggattacaggtgtgggccaccatgcctggccgagtttcccatttaatatttttggaccatggttgaatgcagataactgaaaccgtgaaaagtgaaatcacagacaaggggggactgctctgtaaataaaagcgtgtgggaagttaaatatttcctaactttctctaaaccttggggtttagagtgcagggagaaagtacatgttaaaaagtttcctaattatgctttcaaacatactgaacttctcatcaaccagagttgttcttcatgaacactcaccttggagaactcctccctgaactgtccttgactcttcttgttccaaccaagagattagactgggtttgatgatctgacctcctgagcacagagaaatacattaatggaagaggctcataaaaaagattacaaacctttctgtgattcaggaactacagatctaatgaaagtggtgaagctatttcaaaagggcgaaaaatgcaaataacaactctgactgtgccccaaacagtctggttacttctgtcccctaaaccgaaattcaggcttatgtacacatttaaaaagcactgagacttttattcaaacacaaaataatggccgagtgtggtggctcatgcctgtaatcccagcactttgggaggctgaggcaggtggatcacttgaggtcaggagttcgagaccagcctggccaacatggtgaaaccccatctcttctaaaaatacaaaaaaaaaaaaaaaatagctgggtgtggtggcgcatgccagtaatcccagctattcgggaggctgaggcccaagaatcgcttgaacccaggaggcagagattgcagtgagctgagatcatgccagtgcactccagcctgcgtgacagagtgaaactgtctcaaaacaagaacaacaacaaataaggaataaggaagtataacagagatcttcattcttctggggaaacaactaccccagtgttttttaaaacattattgtgcatcagagtcatccagagaacttgttcaaacacagattattgggcttcaactccaggtttctgggtggagaaggaaaatgtacatttctaacaggcagatggtgttgctattaatcttggaccacattttcagaatggtcacagtagattaaaatctatttaggacagggactatgtctctgttatttctctttgcattcagagttgacattgccaatgctgcaaaacagtaagtacaaaacatatcagttccatagaaggctgcaagggatgaggccagtcttacctactgtggccaggttcttgtagttctccagcatcacgtcactgtagaggcttctctgagttgagtccagtaaagtccactcctcctgggtgaagtccacagccacatcgtcaaaggtcactgaatcctaaagcatcacacacatgctggttggagccaagtaacaagcccatcagcgttcgctggaggatgaggaagggggacccaatgcctatgcaggattccaagggctgcagtgaccagccccaggttttaagggtcctagaaactcctcgcaccctaaacatactcactgtcatctcctccactcatagtgcattaatggcacttcttgaatatgaatttatctcagcacaaccagactaggagatctcttttttttttgaaatggactcttactctgttgcccaggctggagtgcactggtgcaatcttggctcactgcaacctccacctcccaggttcaagcaactctcctgcttcagcctcctgagtagctgaaattacaggcacacgccaccatgcccggctaattttttgtatttttagtagagatagggtttcagcatactggctaggttggtctcgaactcctgacctcatgatccgcccccttcagcctcccaaagtgctgggattacaggcatgagccactgtgcccgcccaagatctcatcttatttccatctatttgagcgcattgctcagcacattccagacatctgatcaatgctgataaacaacttaaaggacacttttttttttaatttttttgagacggagtcttgctgtgttgcccaggctagagtgcagtggtgcaatcacagctcactgcagcctcaacctccagggctgaagtgatcctcccacttcagcctccaaagtagctgggagtccagtcatgtaccactttgcccagctaatttttaaattttttgtagagacggggtctcactatgttgctcaggctgatcttgaactcctgtactcaagcaatctgcctgcctcagcctcctaaagtgctgggattatgggtgtaagccaccatgcccggcctgggatgatttccaagttagcacctccctatatgggtggccccaacccttggggaaattcaaatggggattcagtccttgagtgacactttatttgctttaagaagcctggagaccggagcttgcagtgagccgagagcatagcactgcactccagcctggcaacacagcgagactccctctcaaaaaaaaaaaaaaaaaaagaagtctggagacaactctgcctagagggaaatgtgtctacctggtggatgcaagtatgtcactatgtataagaatacagctgctttttacctgataacaatctgttaggcagtcagccactattcttcctgctggtgtcttttcttcatgaaggcaaactgggtccccagaaagataatgtcctgtaagaaaatgaaggcaagagaaccccgagctgaccataatccccacatccacctacctagaggtcattacctcctagtatgaaattcccatatattcctgcaaaatcaggaaaacacacataaggccagttgcagtggctcacatctgtaatcctagtgctctgggaggttgaggtggaaggattactttaggcgagaagtttgagatcagcctgggcaacacggtgagaccccgtctctacaaaaaaattttaaaatgagcctggtgtggtaacacacacctgtagtcccatctccttggggaagctgaggcaagaagattgcttaagcctaggagttcgagactaccctggacaacacagtgaacataaactccccatctctacaaaaaaatttttttaatcagccaggcatggtggcatgtgcctgcagtcccaggtacttgggaggcagaggtgggaggattgcttgagcccaacagtttgaggctgcagtgagctatgaatgcaccactgcactccagcctggacaaaagagcgagactttgtataagaaaaaaaaaaaaaagaaaagaaagaaaatgcaaacatacaacctactaccatacaatgccagagcagtcctaaacgtgatgatgagctgtgctgcccatcaggaaaagtacaatagtctcatttcacacataaggaaacatatacccagagcatgggactctatcatgctgattagaattcatgaaggagattatgcagtacctctttccaaaattcacaggcagagcctgactcacaagacagcacgttctggcacccctcagcacctcccaaatgaatcagcaacatgaccagctgcccaaaccactagaccctatattgtgtaaagggaacctagaacaggatatcctaaaaagagcaacagagcttaccatgggacaaatcagcagctgccatcccgcgaggtgagaacgtgtcagaaccctcctttcattgatgtcaccatcacttcaggacacctcattaatctaaatggacagtggcaatctccattcctctttaaacagggttattgggattcctgttggtattaatcaataatcaacaagcagtacttaatcatcagccatcaaacatatacaccggctggggcagtagctcatgcctgtaatcccagcattttgggaggccagggtgggaggactgcttcagcctagaagtttgagaccagcctgggcaacatagcaagaccctatctctaaagaaacaaaaataaaaataagtaaacaaacaaaaaaaaatgaagtggtaaaccagaacctgaatgcaagtacaagttttgcacacacacatagaaaaaataatctcacaatacacttttaagtattgggtagcctcaactgggccttgattggaaacactcaaatcaaatctgcatccccagctcacactgtcagagaggcaaggccaaaccactctgtgcctaacactggtctgttttatgggtcttcaaagagaactaccttttcatagtatttatctggttaatttttttccaccaaagtttggttttatttggctgggcagggtggctcacgcctgtaatcccagcactttgggagcctgaggccagaagatcatgaggtcaggagttcaagaccggcctaaccaacacggtgaaactccatctctactaaaaatacaaaaattagccgggcgtggtgtgcggctgtaatcccagctactcaggaggctgaggcaggagaatcgcttgatcctgggaaatggaagttgcagggagctgagatcacaccactgcactccagcctaggtgacagagcaagactctgtctcaaaaaaaaaataataataataataatgacaatcattaattaatcaaacatgaaacagtggctcaaacaatcacctacagaatgggagtcaaatgatgataaacagtgaaagttccgcagttcattatccatgaaccaaattcacaaaaactctataggcctccttctaccaataagactaaaaccctaaagtcacaaaaaccacagttctggactcctggtatagatcacacctactcccaggggtctcaaactaggggtcctagggctgactaggcccacaaatattcagtttggtggcatctgtatagaatatttaactctttttttttttttttttttggagagatggagtcttgctatgttgcccaggctggtcttaaactcctgggctcaagagatcttcctgcctcagcctctcaaagtgctgggatcacaggtgtgagccactgtacccagccagctttttttttttttcattgatatacaatcaatgtagcttaaaatgcacacatccttcgtttctcttttttttcttttgagacggaggctcactctgtctcccaggctggagtgcagtggcacgatctcagctcactgcaacgtccgcctcctgggttcaagtgattctcctgccttagtctcccaaatagctgagattccaagaccccaccaccacgctcggctaattttttttctatttttagtagagacggggtttcaccatcttagccaggctggtttcaaactccttaatccaaccatcctgttcattgtaaatttgattattgtgatactagaataataaagccttcatcctttccctctggaggtctgattaagaagctctcttgggatgtacaggcctaggaactccattcgaagataatgaattattattcttagtattctttagcagaaagacttgcggtctacaaacgtttatattcacatacacaaatacgcacaccctataaacctaaaaagcatctttatctttcgccatgaaagtaatggtcaaaaataaaacacaacacaataagacgaaaccaaacttacagatgaaacattcgtttgcataagagaagacagaaaaggccccctagaaccaactttcacccagtgctcaccggaacactcagaaatcgccaggtccctgaaccgggaagatcctggggacggagccaacgcggatgcaaaaggcagcaattattttcctgccggaaaaaaattcacaaacgctgctttggaggcctttggagaggggcgcacagatgaaaacaccctgcggacaccgtaactataaacccgactcctcccgaggagcgacggtccgagcggacgctagcgggcccagcagacacgagcagagcgggccaggcctctctaacgtccgggccaaacccgtccttcaccccaaaaccagttcatctcctcggaactcacccaggccagtgaggccttaactctgaaaggcaaaaagactctcaggcgctcacagccggcgtcacaaaaggaacggcgcaccgctgacgtcatttacgctctccgcctcgggccaggcggggtttcgggactagggtttctgccgtgtaatacctcctcgaggcagaaaaattctactttccatctgcttggctgcggaggaccttggggtgggctcagcgtgggggctgcaggcagaaatgggtccagaaggcaaggtcgaggttagagccaagcctgtgggcagggctacgggcagggggcggggaggaatgtgggtccaggcccagaggaaaaggttgaagttatagccaggcctgtgggcgaggccgcagcagggcggccataggggaaggagccaatgtgttatgcatgtagaaaataggtaactacgtcttttgctctgttactatttcaacatttgatgtaaaaaacattttctatgcagctaaaagaattgtttttaaaaataatttctaggttttctgccttgctttaaaacatcttttctttttttttgagacaaaatctcactctgtcaccaaggctggagttcagtggagccatctcagctcactgcaacctccacctcccaggttcaagcgattctcctgcctcatcctcccaagtagctggaattacaggtgcatgctgccacaccctgctaatttttgtatttttagtagaggcagggttttgccatgctggccaggctggtcttgaactacttgtcaggcctctgagcccaagttaaatcatcataaaccctgtcacctgcacgtatacatccagatggcctggagcaactgaagaaccacaaaagaagtgaaacagccagttcctgccttaactgatgacgttccaccattgtgatttgttgctgccccaccccaactgatctcttgaccttgtgacattcttcttctggacgagtctcaggagttccccaccgagcaccttgtgacccccggccctgccagcaaaagataaccacctttaactttccactacctacccaaatcctataaaactgccccacccctatctccctttgctgacccctttctcggactcagcccacttgcacccaagtgaataaacagccttgttgctaacacaaagcctattggtggtctcttcacatggatgtgtgtaacatttggttccgaaacctgggacagggggactcccttgggagactggccccgtcctcaccctcactccgtgaggagctccacctactacctcgggtcctcagactagcccaaggaacatctcaccaatttcaaattgggtaagcagtctcttcactctcttctccagcctctctcactacccttccatctctctgtccttccaattccagttctttttcctctccagtagagacaaaggagacacattttatctgtggacccaaaactccagctccagtcacggactcaggaagacagtctttccttggtggctaatcactgtagggatacctgcctgattattcacctacattccattggtgtctgatcactgtggggatgcctgccttgatcattcacccacattcccttggtggcaagtcaattgcagggctgcctgctttggctgcttacccacattacagcccagggctgctcacccccaccccactccactgccttctccatgtctctacctttctctttaaacttacctccttcactatgggcaatcttctgccctccattccctgttcttctcccttagcctgtgttctcaagaacttaaaacctattcaactcacacctgacctaaaacctaaataccttattttcttctgcaacaccacttggccccagtacaaacttgacaatggttctaaatggccagaaaatggcacttttgatttctccatcctacaagatctagataatttttgtcataaaatgggcaaatggtctgagatgcctgacatccaggcattctttacacattggtccgtccctagtctttgctcccaatgtgactcatcccaaatctttcttgtttctttcttgtcctttgaatcctccttttctatggacccatctgacctctcccctccccctcaggctgctcctcgccaagctgagccaggtcctaacgtatccagaattggtgggttcttggtctcactgacttcaagaatgaagccgtggaccctcgcggtgagtgttacagttcttaaaggcggcgtgtctggagtttgttccttctgatgttcggatgtgttcagagtttcttccttctggtgggtttgtggtctcgctggctcaggagtgaagctacagacctttgcggtgagtgttacagctcttaaaggcagcatggacccaaagagtaagcagtagcaagatttattgcaaagagcaaaagaacaaagcttccacagcgtggaaggggacccaagggggttgccactgctggctcagtagcctgcttttattctcttatctggccctacccacatcctgctgattggtagagccgagtggtctgttttgacagggtgctgattggtgtgtttacaaaccttgagctagatacagagtgccaattggtgtttccacaatccctgagctagacataaaggttctccacatccccaccagactcaggagcccagctggcttcacccagtggatcccgcactggggctgcaggtggagctgcctgccagtcccgcgccatgtgcccgcactcctcagcccttgggtggttgatgggactgggcaccatggagcaggggggagctctcatcagggaggctcgagctgcacaggagcccatggagggggtgggaggctcaggcatggcgggctgccagtcttgagccctgccctgtgggaaggcagctaaggcctggcgagaaatcaagcgcagcaccagtgggctggcactgctaggggacccagtacaccctgtgcagctgctggcctgggtgctaagcccctcattgcctggggccagcagggccggccagctgcttcgagtgcagccgccaagcccacgcccacctggaactccagctggcccgcaagcaccatgcacagccccagttcccgctcgcgcctctccctccacacctccctgcaagctgagggagctggctccagccttggccagcccagaaaggggctcccacagtgcagcagtgggctgaagggctcctcaagtgccgccaaagtggaagctcaggcagaggaggcgccaagagtgagcgagggctgtgaggactgccagcacgctgtcacctctcactaattcttcctcagcctctgctccctaccctgtgatctttctatcacctccccttctcacacccggtccagcttacagtttcattccatgactagccctcccccacctgcccaacaatatcctcttagagaagtggctggagctgaaggcatagtcgaggttaatgctcctttttcttcatccaacctctcccaagtcagttagcatttaggctctttttcatcaagtataaaaacccggcccagttcatggcctgtttggcaacaacccttagacagtttaccaccctagaaccagagaggccagaaggccatcttattctcaatatgcattttattctcaatatgcattttattacccaatctgctcccaagactagaaaaagctccaaaaattagattctgaccctcaacccccacaacaggacttaattaacctcaccttgaaggtgtacaataatagagaagaggcagccaagtggcgttgtatttctgagttgcaattacttgcctctgctgtgagataaaccccagccacatctccagcacataagaacttcaaaatgcctaaaccacagaggccaggtgttcctccaggacctcctccctcaggttcttgctttaagtgctggaaatctggccactgggccaaggaatgcccgcagcccaggattcctcctaagccatgtcccatctgtgggaccccacttgaaatcggactgtccaactcacctggcagccactaccagagccactggaactctggcccaaggctgtctgactgactccttcccagatcttctcggcttagcagctgaagactgacactgcccgatcacctcgggagcctcctggactatcacagatgctttgggtaactcttacagtggagggcaagtctgtccccttcttaatcaatacagaggctacccactccacattaccttcttttcaagggcctgtttcccttgccttcataactgccgtgggtattgatggccaggcttctaaacctcttaaaaatccccaactctggtgccaacttgaacaactttcttttatgcactctttttagttatccccacctgcccagctcccttattaggtcaagacattttaactaaattctctgcttccctcactattcctgggctatagccacacctcattgccacccttttccccagttcaaagcctcctttgcctcctccccttgtgtctcactaccttaatccacaagtatgggatacctctactccctccttagcaactgatcatgcaccccttatcatcccttgggggtaaaacctaatcacccttaccctgctcaatgccaatatcccatcccacaacaggatttgaggggactaaagcctgttatcacttccctgttacagcatgaccttttaaagcctacaaactctccttacaactctcctatcctacctgtccaaaaactggacaagtcttacaggctggtccaggatctttgccttatcaaccaaattgtcttgcctatccaccccatggtgccaaacccatatactctcctatcctcaatacctccctcctcaacccattattctgttctggatctcaaagatgctttctttactattcctttacacccttaatcccagcctctcttcactttaacttggactgaccctgacacccgtcagtctcagcaacttacctgggctgtactgctgcaaggcttcagggacagcccccgttacttcagtcaagcactttctcatgatttactttctttccatccatctgcttctcaccttattcaatattttgatgacctcctactttatagcccctcctacaaatcttcccaacaggacaccctccggctcctccaacatctattctcaaagggatatcgcgtatccccctcaaaatcccaaatttcttcttcatccgttacctatctcggcataattcttcataaaaacacacgtgctttccctgctgatcatgtctggctaatctcccaaaccccaatgccttctacaaaacaacaactcctttccttcctaggcatgcttgggtactttcacctttggatacctggttttgccatcctgactaaaccattatataaactcacaaggaaacctagctggccccatagatcctaaatcctttccccactcctctttccattccttaaaaacagccctggaagctgctcccacactagctctccctaactcatcccaacccttttcattacacacagccaatgtacagaactgtgtggttggaattcttacacaagagctgggaccacgccctgtagcctttctgtccaaacaacttgaccttactgttttaggcttgccctcatgtctccatgtggtggctgccaccactttaatacttttagaggccctcaaaaccacaagctatgctccatttactctctacagttcccataactttcaatatctattttgttcctcacacttgacacatatactttctgccccctggctccttcaactgtactcaccattcgttgaatttcccacaattaccattgttcctggcccagacttcaatccggcctctcatcttattcctgatactacatctgaaccccatgattgtatctctctaatccatatgacattctccccatttccccatatttccctgtttcctgttccccacccagaccacacttggtttattgatggtagttcttccaggcccaatcaccaatcactggcaaaggcaggctatgctatagtgtcttccacatctatcattgaggctatggcccttcccccttccactgcctctcaacaagctgaactcattgccttaactcgagccttcactcttgcaaagggaatacgtgtcaatatctatactgattccaagtatgccttccacatccttcaccaccatcctgttatatgggcagaaagaggtttccttactacacaagggtcttccatcattaatgcctcctcaataaaaactcttcttaaagctgctgtacttccaaggaagcttgtttcattcactgcaagggccatcaaaggacatcagatcccattgctcaaggcaacaattatgctgataagggagttaaagaagcagctagccttccaacttctgtccctcatggccagtttttctccttctcatcagtcactcccacctactctcccactgaaacttccacctatcaatctcttcccaaacaagacaaatggttcttggatcaaggaaaattcctccttccaccctcacagcctcatttcattctatcttcctttcgtgacctcttccatgtgggttacaagccactagcccacctcttagaccctctcatttcctttccatcatggaaatctatcctcaaggaaatcacttctcagtgttccatttgctattctaccactcctcagggatttctcaggccccctccctttcctacacatcaagctcaggggttcacccatgcccaggactggcaaattgactttatccacatgccctgagtcaggaaactaaaatattcttggtctggtagccactttcactggatgggtagaggcctttctctcaggcctgagaaggccaacgtggtcatctcctcccttctgtcagacataatttctcgatttagacttactacctctatacagtctgacaacagactggccttcattagtcaagtcactcaagcagtctctcaggccttgggcattcaatggaaacttcatgccccctaccgccctcagtcttctggaaaggtagaaaggaataatggtcttttaaaaacacacctcaccaaactcagccttcaacttaaaaaggactggacagtatttttaccacctgccctcctcaaaatttgagcctgtcctcgggatgctacagggtacagtccatttgaacttttatatggacataccttcttgctgggccccaacctcattccagacaccagccctctgggggactaccttccagtcctccagcaggctagacaggaaatttaccaggctgctaatcttcttttgcctactccagattcccagccatatgaggacaccctagctggacgatcagttcttaagaatctgacccctcaaactctacaaactcggtggactggaccccacttagtcatctatagtactccaatggccatccatctgcaggaccctgcccattgggttcaccattccaggataaagctgtgcccatcggacagacagcctgatctctcctcttcctcctggaagttgcaagtactcacccctacttcccttaaactcacccgcatttctgaagaacagtagtgacacttgtgagcctaatacaccctttcattttgttaggtctattcttccttaccctgatctttacaacagggcttcacacagtcacccccactacttggactgtaccccaaaacttttcatccctgctatcttctgtctagtcatactcctactcttcattctcacctacccataaatgtcctgcccttgtctacactgccagtttacactttttctccaaaccatcatagctgatatctcctggtcttagcccctaaccaccactcttaactcccccttggagtggatagatgacctttgctggcaaggcacactccaattctttcaccctgatgaagtccttttctttacttttcctcattcccattctcctgccatcctctacccctccctaattacctccaacatactatcaatctcgctcactccctcctcactctttctaatccctccttagtgaacaattgctggctttgcatttcccttttttcctgctcttacacagctgtccccaccttacataccgactgggcaacatctcctgtctccctacatctctgaacctcctttaacagccctcatctttacccttctgaagaacttctttactttctagacaggtctagcaaaacctcagacatttcatatcagcaagctgatgctcttctccgcatctacttaaaaaatctttatccttgattgaaaccatcctggctaacacggtgaaactcgtctctactaaaaatacaaaaaattagctgggcatggttgcaggcacctgtagtcccaggtactcaggaggctgaggcaggagaatcacgtgaacccaggaggcagagcttgcagtgagccgagatcgtgccactgcactccagcctgggtgacagagcaagactctgtctcaaaaaaaaaaaaaaacctttatccttatattaattctactccacccatatttgaacccctcacaacataaactactatccctgttgtcactcctttgtgcatctctcggcaaagactgactggaattcccctaggtaacatttcaccttctctatgcttcttcactcttcatctccaaagcccaactacacatattaccaaaaccaatggggctttttagctccacattatagataagccctctatcaatactggcaaacttaaaaacattagcagttactattatttaggaagacatttgtcctgcacttcactccatccttggctaccttccccttgttcttcagcctctcctcccagccccccttcttgtttacttatacacaaccccatgaatagcaatgaaaggttgcttgtagacactatgagttttctaatacaccatgaatactgaacctctccctctacccagttgccctatcaatccccattacaacttctaacggctgctgcccttgctgtgagaggtgacaacatgctggcggccctcactcactctcagcacctcctcagccttggtgtccacctggccacacttgaggagaacttccacccaccactgcactgtgggagcccctctctgggctggccaaggctggagccggctccctctgcttgcagggaggtgaggagggagaggcatgggtgggaaccggggctgtgctcggcgctcacgggccagcgcaagttccaggtgggccctgcacttggagcagtcggctggcaccaccagccctgggcagtgaggggcttagcacctgggccagcagctgcggagagtgcgccgtgtcccccagcactgccagcccacccatgccatgctcgaattcttgccatgcctcagccgcctccccacagggcagggctcaggacctgcagcccaccaggcctgagcccccctgtggtgggctcccacatggcccaagcttccccaacgggcgccaccccctgctccatggtgcccagtcccattgactgcccaagggctgtggagtgcaggcatggcatgggactggcaggcagctccgcctgcagcaggatccactaggcaaaccagctgggctcctgtgtcgggtggggacttggagaacttttatgtctagctagaagaccgtaaatgcaccaatcagcactctgtgtctagcttaaggtttgtaaacgcaccaatcagtgctctgtgtctagctaatctggtggggcttggagaacctttatgtctagctaaaggattgtaaatacaccaaccagcactctgtgtctagctcaaggtttgtaaatgcaccagtcaacaccctgtgtctagctcaaggtttgtaaacacaccaatcagcactctgtatctagctaatctggtgaggacttggagaacttttatgtctagctagaggattgtaaatgcacgaatcagcactctgtgtctagctcagggattgtaaacgcaccaatcagtaccctgtcaaaaaggaccaatcagctctctgtaaaatgcaccaatcagcaggatgtgggtggggccagataagggaataaaagcaggctacctgagccagcagcggcaacccgctcacatcctcttctacactgtggaagctttgttctttcactctttgcaataaatcttgctgctgctcactctttgggtccacactgcctttatgagctgtaacactcactgtgaaggtctgcagcttcactcctgaggccagcgagaccacaaacccaccaggaggaatgaacaactctggacaggaggaatgaacaactacagactcacagccttaagagctgtaacactcactgcggaggtctgcagcttcactcctaaagccagcaagatgacgaacccaccagaaggaagaaactccaaacacgtctgaacatcagaaggaacaaacaactacagactcacagccttaagagctgtaacactcactgcggaggtctgcagcttcactcctaaagccagcaagatgacgaacccaccagaaggaagaaactccaaacacgtctgaacatcagaaggaacaaactccagacacaccacttttaagaactgtaacactcaccttgagggtctgcagcttcattcttgaagtcagtgagaccaagaacccaccaattccagacacagctggatccctaggagtctgggtgcacctcttttggcgctccctctcatcttttcactttacatttccagttttgccttacacaagatctcttcttccctgtgactcctccacctacatgtgtctacctattaattggacaggcacatgtacactagttttccttcttccaaaaaatcgatttgcaaatgggactgaacagcatcctgttcccctcaggacacgaacacttcactacagttttgtttttcttattaatataagaagacaggaagaggcctcgacttactcactgctgaaaaaggaggactctgcatatttctaaaattagaatgttgtttttacctgaatcagtgtgccctgaattaagactacataaaaaactcaaaggtagagcccaaaaaactcaccaaccaggcacataattatgctggacctccctgggcactttctaataggatgtcctggctcctcccaattcttagtcctctaatacttgtttttctccttctcttattcagaccttgtgtcttccgtttagtttctcaattcatacaaaaccacatccaggccatcaccaatcattctatacaacaaatactccttttaacaaccccacaatatcaccccttttctcaaaatctttcttcagtttaatctctcccactctaggttcccatgttgcccctcatcccacttgaagcagccttgagaaacattgcccattatctctccatagctccccccaaaattttcattgccccccaacacttcaccactattttgtttttctgattaatataagaagactggaatgtcaggcctccaagcccaagctaagccatcataacccgtgtgacctgcacgtatatatgcagatggcctggagcaactgaagaaccacaaaagaagtgaaacagccagttcctgccttaactgatgaggttccacaattgtgatttgttcctaccccaccccaactgatctcttgaccttgtgacattcttctcctggacaatgagtctcaggagctccccaccaagcactttgagacccccgcccctgcccacaaatgataaccacctttaactgtaactttccactacctacccaaatcctataaaactgccccacccctatctccctttgctgactcctttctcagacttagcccacttgcacccgagtgaataaacagccttgttgctcacacaaagcctgttggtggtcttttcacacggacacgtgtaacactcctgacctcaagtgatctgcccaccttggcctcccaaagtgctgggattacaggcatgagccaccgcacctggcctaaaaagtcttttcaaactctagatgacagagatttcaatcttttcatttgaaatgtattactttaaaaatttatatgttttgttagggtgcaggggctcacacctgtaatcccagcattttgagaggccaaggtgcgcagatcacatatatgtgtatatacatatatatttttattggaatgtatttgggcatgtggtgtggagtagtggatccaattttatctcatccaaaaagagggccaatttttgtagcaccacttattgagagaaactgcctgatatggtttggctctgggtccccacccaaatgtaatccccaatgttggaagtggggcctggcaagaggtgattggatcatgggggtggtttctaatggtttatcaccatccccctagccctgtctcatgatagggttctcaggagaactggttgtttaaaagtgtgtagcacctccccctttgctctctctctcctgctccaccatgtaaagtcctgcctgcttcctcctcaccttccaccatgattgaaagtttcctgaggcctcccagccatgcttcctgtgcagcctgtggaattaaacctcttttcaaatttctttctaaattagagcagtgcaggaacagactaaggcactacatttgacctgctgatatgaaattctaccttattaattttttttttaattgggccaggtgcaatagctcatgcttgtaatcccagcactttgggaggctgaggtgggcagatcacaaggtcaggagttcaagaccagcatgaccaacatggtgaaaccctgtctctactaaaaatacaaaaattagctgggcgtggttgcacgcacctgtaatcccagctattcgggagggtgaggcaggagaattgcttgaacccgggaagcagaggttgcagcaagccaatattgcaccactgtactccagcctgggtgacagagagagactccatctcaaaaaacaattttttcatcattatggatacataatagttgtattcttaaattttttaaaactttgttactcctaattttatgacattaaacttttgaattattatggacacaattgtatccacctttttaaaacagtaattcttatatatacctgtatcagtttctagatccttctgtgccattcatagatttactcatgccaatcttattatattcctttgattccaatggttttatatcaaattttaatatttagttgtaaaaatataagggtagccaatgtttgttgacgattactcttatgggatctttgaggtgtcagttatcttcccctggaaatcctctgttgccagtggcaccttcacccaagttgaagaagaagaagaggagctttatttagtgttagagcagctcagaggagctgggtacggtggctcacacctgtaatcccagcactttgggaggccgaggtgtgcggatcacctgaggttgagagttcaagaccagcctgaccaacatagagaaaccccttctctactaaaaatacaaaattggccaggcatggtggcacatgcctgtcatcccagctacctgggaggctgaggcaggagaatcacttgaacccaggaggcagaggttgcggtgagctgagattgtgccattgcactccagcctgggcaacaagagcgaaattctgtctccagaaaagaaaaaaaaaaacaacagctcagaggagacccacagtgagtagctcccctctgtgggcaggcaggtcatttgtcgagtgtccagctctcagcagagaggaggcccttgggagggtagctcctctcctcaggcaagttgttcggtggtctctgcaggtctctgagggtctcagcagagacactagctcctctcttctgctagtggcactgtctgctcagctctggctgagccagggacatttagtgagcctcagagggcaggaagtgcatgccaattggcccatgggtggccatgggcgggcctggaaaaggcaccaattaccattccagttcatgggactggcagcccagccaccagccttcaggccgtccctggccagaaggaggaaccttaccagggacctacccctttccccctgggactctctcatgtctatcctgctgttcatggtgacccggcttggcctgactttgctccaagataggagggggcgtggacagcagggagaagccaggcagctggggcaggcattaaacattagccaggcacagtggtgcatgtctatagttctagctactcaggaggctgaggtaggaggactgcctgagcccagcaggctgaagctgcagtgagcagtgatcacactgaggtaggaggaataatttgactccagaggtggggctcagacctggacaaaattgaggactagctaaaacagggatggggcagaagcagctttccataagacacgcctaccagtgagccatgtcagtttaacattgccatggcaacacccaggagtttccacccctttccatggcaatgacccgatgaccaaagttaccaccattttcctacaaatttctgcataaactgccccttaatctacatgtaattaaaagtaggtataaatatgaccgcaaaactgccctgagctgctactctcagcacactgcctatgaggtttcccataggagtagtcacaaagctgtaccaccaccagagctgaaacactgcttcttcgataaagcttctttcttctaccaccagctcaccctgaattatttcctggccaaggccaaaaaccctcattggctaagtcccaatttgaagcttgcttgtcctacagcagcatgactgcactccagcctgggtgatggagtgagagcctggctcaaaaaatatactttatcaaacagaggtatattagaggtaagttaagatagaacagtttcttaattctgaaaaaaacaaaacatttgcgtaaagaacaatcttttgaataaaagtcataaaaacaggccaggcgtggtggctcatgcctgtaatcccagcactttgggaggctgaagcaggtagatcaactgaggtcaggagttcgagaccagcctgaccaacatgattaaatcccatctctacaaaaaatacaaaaattagctgggcatggtggtgggtgcctgtaatcccagctactcaggaggctgaggtaggagaattgcttgaacctgggaggtggaggttgctgtgagctgagatcatgacattgcactccagcctcagcaacagcgcatgactccgtctcaaaaaaataaaaaagaagcccaggcgtggtggctcatacctgtaatctcagcactttgggaggctgaggcaggaggatcaactgaggtcgggagttcgagaccaaactggccaacatggtgaaaccccacctctactaataatacaaaaattagccaggcatcttagcgcacacctgtaatcccagctactcgggaggctgaggcaggagaatcacttgaactcaggaagtagaagttgcaatgagccaagattatgccattgcactccagcctgggagacagagcgagtctctgtctcaaaaaaaataaataaaataaaataaaaagaatttgcatttggggaagtttgtcaaagatgttagaaggctcaaaacatttgattgaaacaggataacagctcacttgttagtaatccatgtaaatacagtgataatcaaaagtcattagtaggagtaaatagagttactaggaaaaaatgaatccttttaaagcccagagttttttgttgattctttttatttatttcaggggtagatgggggacagcgtctcactcagtggcccaggctggagtgcagcagcacaaaagttcactgcagcattgatctcccaggcctaagtgatcttcccacctcagcctccccagtagttgagactacaggcacacgttaccacacccagctaatttttgtatgtgtgtctttttttttttttttttttttaagagatgggctttcatcatgttgcccaggctggtatcgaactcctgaactcaagtgatcctcccacctcagcctctcaaagtgctgggattcaggcatgaaacaccatgcccaaccaaccaggtttttttttttaagtgataaaaaacttaataaaggcaatacaggaaattatctcgataatttcttgtaaaacctttcttagaccagctaccaaaaaggtaaagaaaaaccttctacagtgtgattatttctccttatgcaaagtgcatttagataacctggaagttggccaggcatggtggctcacacctgtaatcccagcacttgggaagccgaggcgggtggatcacttgggtcaggagttcgagaccagcctggccaacatggtgaaactctttctctactaaaaaacacaaaaattagccaggggtggtggcacacacctgtagacccagctaccaaggaggctgaggcagagaatcacttgaacccaggagacagaggttgcagagagctgagattgcgccactgaactccagcctgggtgacagagcaagaatccatctcaaaaaataaaataaaaataaaaataacctggaagttgaacgtgatgaaaagtgtgcttggatttagttaggaatatgtccaaggctatgagtgtaaaaatttaggtacatcaagaaaagccgagagtacagaatcaagttatacagagcaaatacattgcttttctaggccttcatgataaatatttcagtgtcaggccataatagccgatttagaaccaaagaaaaaacttacaggagcagacaaaaaagttggagacagtcatcatcccagaccttctcaatgtgaaaaaaagaaggcaatgatgtatgacctgcaaatgacatacactgagatgcaagtaaagttgagcctctgagacatgaatgagaaatctgaaaaaacaaaactctacctcaacaaattggctggttttggttttggtggctcgttcctgtaatctcagcactttggaaggatgaggcaggagagtaacttaaggccaggagtttgagaccagcctgggcaacatagctagatgccatctttattagtctgttctcgcattgttataaagaaataactaacagtgggtaatttataaagaaaaaaggtttaattggctcacagttctgcaggctggacaggatgtatgttgctggcatctgcttggcttctggggaggcctcaggaaacttacaatcatagcagaatgcagaggaccaggcatgtcacatggccgaagcaggagcaggagagagggggaggtgctactcacctttaaacgaccaaatcgagtgacaagaactcactcactatctatcacgaggacagtaccgaggcaggtagtgctaaatcactcatgagaaatccaccccgccatgatcaagtcacctcccaccaggaacaacctgtaacattgggaattacagctgaacatgagatttgggtggggacacatatccaaaccacatcatcatctctacaaatttttttaactgtatgaaattccacctcaataaataaaattactgttttaaatgatgaggacagcatttaaaacctgaaaactacagaaattaaatcgatctcaggaaaaaatgtggccgaaatagaaactagagtttagaagatggctactaacagattttagaacgaacaaacaaaacgtcttgcaaatttattaagtgcagataaatatgtcaaaaaaaaacacaccttcttgttttcaatatagaggaccagattctggtcctgtatcagtgcacccaacaccactgtttaatttttaggaaaaaaatatcctatgtacaatttcttttcaatcctagccaacacaatcatacaataaactgtcggtaaggcttatcttttataaatcctattcaaattgtttagacgtttaatcattttcttaaaccttcagtcttagacttacagttttctccttttatattggtacaaccaatcattttaccttaggacaaaaatttaccacataagattctcacacaaaaattactttttcctaaatttgtatttggagtaatagaccaaaatatatctactctttttagaaattttaagaagccagctgggcacggtggctcatgcctgtaatcccagcactttgagaggtgaaggcaggtgaatcacctgaggtcagcaattcaagaccagcctggccaacatggtgaaaccccatctctactaataatacaaaaattagcctgtcatggttgtgggcacctgtaaacccagctactcgggaggctgaggcagaattgcttgaacctgggaggcagagggtgcaattagctgagattacaccattgcactccagctgggtgatgagtgaaactccgtctcaaaaaaaaaagaaagaaattttaagaagccaagaatgaatatatattttttcagtaatttgtttgccttatatcttatttggatatgacccagataattaatattatttaagattttaaattacatgaaaagtttatttataaacatttattccatttacagttacctttaatttctaattacacctagattacttattaagatttgacacagctagtcattgttttaaattattttttattaaccaattttatatcctgttaatattgtttaccaaagttcaaaccctacactaaatacatggttattctgtcaataactcagaagatatagctattgttattaaatcaaaaatattaagtaaatctcacttataaaagaattgcacaaagatcattgttttagattgggtttagcttcatgaacttaaagtatctaatagagacagacacaacactgtcagaccagtaaacccagacaaaaatatatgctgacaattttgaagacatatctaattttatcgacaactttaaaaccaattaatttataaaagaattgtcatgtgaacttaaaaaaaattgtgttcatttttttatgaacacattttttttgatctgccctcctcggcctcccaaagtgctgggattacaggcaggagccaccatgcccagcctgatttctgtagttttatagtaacttttgacatcaggaagcatgagttgctcttttttaaaattgtttttaatactggggctccagttatgtgtgggctttcataacctaatttcagaactggcttaccagaacttctgccatattctggtggttacacatatcaatcatagtacagtatgagaggattacacaagggtagtcctcaaataccaggaagcagaaactggaggccaatttggaggctgcctagcacagagaatttgtcaatgtctaatatactacctatttaatccagcaatcctaattctaggaatttgtcctgaatgtaaatgcctaaatatacaaaaatacacatgctcaagaatactaactgcatccctgttagtaattgcaaatttgaattctctaattgatgacatgtagtagagcagctgaatattacatggtacatccacaaaaggagtattatgcagctacagaatgaaggtgaaaaaggaagatatatctatgaatttatatggagtggttatcaagatacactgttaggcaaaaatagaaactgcaagagtatagtatgaaactttttttttttggagacggagtctcactctgttgcccaggctggagtgcagtggcgccatctcggctcactgcaagctctgcctcccgggttcatgccattctcctgcctcagcctcccgagtagctgggactacaggcgcccaccaccacgcctggcaaattttttgtagttttagtagacagggggtttcatcgtgttacccaggatggtctcgatctcctgaccttgtgatctacccgcctcagcctcccaaagtgctgggattagaggcgtgagccaccgtacctgcctgaaatctttttttaaatgggcaataacaaatatatatatgttcatttttgctagaagaaaacacaggattattcagagaaaaaggttcattacctatagctgatgggataggaacaggttgtaaaggacagtgagattagaacagactggaaaggataaggcaagaaaaacgtttatgtttagttctaatgtttaaagtatgcaattaggtgggcgttgtggctaatgcctgttacaccagcactttaggaggccaggatgggaggatcccttaagaccaggagtttgaggccagcctgggcaacattgccacatcctgtctctacaaaaatttaaaattagccagtcctggtggtgcacgctggtagtcctacctactcaggaggctgagggagaaggactgcttgatctcagaagtgtgaggctgcagggagctatgactgcaccactgcactccaacctgggtgacagagcaacaccctgtctcaaaaaaaaataagggtaaaaaatttaaaaactgcctgcacctggtggtgcatgcctgtactcccagcctcttgagacactaaagtgggaggagtgcttgagctcaggagcataaggctgcagtgaggtacaatcatgccactgctctccagtctaggtgacacagcaagatcctgactcaaaaaaaaaaaaaaagataaaccagtataaaataaaacatactattgtttcacatattaatttttttgggacagtctcactctctaacaggctggagtacagtggcacaatctcagctcactgcaacctccacccccaaggttcaagcgattcttctgcctcagcctcccaagtagctggtattacaggtgggtgtcatgacgcctaatttttttctttgagacagtcacgctctgtcacttaggctggagtgcagtggtgcaatcttgactcactgcaacctctgcctctggggttcaagcaattctcctgcatcagcctccccagtaactggaactacaggcacccaccaccacggccggctaatttttctatttttagtggacacggggtttccctatgttggccaggctgatcttgaactcctgacctcatgatctgcccacttaggcatgagccaccacacccagccttttatttattttttttgagacagagtctcactctgtcacccatgctggagtgcagtggcacgatctcggctcactgcaacctccgcctcccgggttcaagtgattctcctgcctcatcctcctgagtagctgggactataggcgcctgccaccatacccagctaatttttgtatttttagtagagatggggtttcaccatattggccaggctggtcttgaactcctgaccttgtgatctgcctgcctcggcctcccaaagtgctgggataacaggcatgagccacggcacccagccgcctggctaatttttgtatttacggtagagacagggtttcaccatgttggccaggctggtctccaactcccagtctcaggtgatccgcccacctcggcttcccaaagtactgggattacaggcataagccaccatgcctggcctgttttacatatctaatttaaaaaaaaatcgacaaggataacggtgtgacacaaaatggaaaattaacaggaattactgaaatgaactttgtatcaaatggataaaaattcaacaatgaagaggggggtaaaaagcacaaaattgacccaagtaacttcttttattacaatttttattgtgataaaaacacataaaatttaccctttcacatactttgtgtgtaccgaagagtattgttaactataggcatatttttatacaacaaatctcaaaaagcttttccatcttgcgtggctgacactcaatacccattgaacaactcattttctcctccaccagcttgtggcaaataccgcagtactttgttcttctgagtttgacgttagataccccatataagtggaaatgggtgtatttgtcctttcggaactggtttatttcacttagcataacgtccatgttgtagcatatggcagaattttgtttttaaggctaaatgatattgcattgtatgtatataatgcattttgtttaccaattcatctgtcaatggacatttactttgcttccacctcttggctcttctgaataatgctgcaatgaacacaggtaggcattcacacattgagatgctttcttcagttcctttggacatgtacctagaagtggattgctgctgaccaagtaagttttaaacctagtgcttttatattacgccctgagctaaagataagaactgtgaataaaaactgaattctggttagttgatttttaaaaagagtggtatgagttatcaattctgagagtagcttatattttaatctaggattgagcacgtgctatttttgcaagtgatgaaagatagctacagacaagggaatttggaaagcaagaaataacccagcagtgctgcagtggaattaaaagtgttggcttgtggtcatgtttttaatatagaaatagagttattaatgtgtggatacgtatatataattttgtatgtctttgccatatcctccatagagaagacctaaaagccagggcactattacctaggaacacctccctacacagagactgcagcttctaaatagtattctccattaaaataaattacatttttctgagtctagggctggagacaaatgtaccatgaacaaactgttgcccagaaaataattatatacccatgaaataaggagaatacatttttaaagattcagaagatagcttgatggggatcctacttattgaatctggaaaaatatgtgcatcaaatttacagtagctaactacaccccatagattaagaatttatgatacatgctcctacaagtaaatgggtaaataaatgaataaggataactcttccttacaaaattccagttaagaaatgtagaagaaactatggaattagaaaatcactttttggactgggtgtggtggctcacacctgtaatcctggcactttgggaggctgaggcaggaggactgcttgagcccaagagcttgagaccagtctgggcaacatagtgagacctcggctctacgaataaaaaaattaagtgggtgcgttagcatgtgcctgtggtcccaggtactcaggagactcaggtgggaggatcgcttgagcccaggaggtcaaggctatagtgaggcatgatcatgccaccgcactccacaccctaggcaacagagcaagaccccaatgcagaccaaaaagaaaaaaaaaaaaaaggaaaagaaaaccaccatttggaaaccactacagcaacagctacagacatacctcatgttacttcactttgcttcatctcactttacagatatttttcacaagtagaagtcctgtggcaatgtcatgtcgaataaatctataacaccattttttccaacagcatgtgcttactttgtctctcacatcctgacaattctgacaatatttcaaacattttccttattattatacttactgtggtgctgtgtgatttttttttttttttttttttgagaaggaatctcactctgtcacctgggctggagtgcagtggtgtgatctcagctcactctaacctccacctcctggattcaagtgattctcctgcctcagcctcctgaatagctgggactataggtgcctgccaccatgcccggctaattttttgtatttttagtagagacggggtttcaccatggtggccaggctggtctcgaactcctgacctcatgattcactcacctcagcctctcaaggtgctgggattacaggtgtgagccaccgtgcccggctgctctgtgatctttgatgttcctattttaattgttttggggtaccacaaaccacaaccttcgaagacagcaaacttaacaaatgctatgttctcactgctccaccaactggccactctcccctctctcctcctcttcccaggcctcctaattccctgagggacaatattgaaattaggccaattcattaccccacaatggcctctaactgttcaagtgaaagaaggagttgcaaatttctcactttagatcaaaagctggaaatgattaacctcagtgagaaagtcatgtcaaaagccaagataagagccaggtgcagtggctcacacctgtaatcccagagtgttgggaggcagataggggagcatcacttgaggttttaagttcaagatcagccgggtaaacagtaaagtcctgcctctttaaaaaaaaaaaaaaaaaaaaaaaaaaattagctggccatggtggtgcacacctgcagtctttagctactcaggagacaggaagatcactggaacccgtaagtttgaggctgcaatgggctataactgtactacactccagcctgggcaaaagggagaccatgtctcaaaaaaaaaaaaaaaaaaaaaactgggataggccaaaatctaggcctcttgtgccagttagccaagttgtgaatgtaaagttcttgaaggaaactaaaagtgctactccagtgaacacacacataataagaaaggaaaacagcctcaccactaacacggaataagttttagtggtctggatagaagatcagaccagccacaacattcccttaagccaaaacctaatccagagcaaggccctaactctaattctatgaaggctgagaggtgagttagctgcagaagaaatgctggaagctggcaaagatcagttcgtgaggtttaacaagtcatttccataacataaaagtacaaagtgaagtagcaattgctgatgtggaatctgcagcaagcatttccagaatatctagataaatggcagaggtagctctactagagttttaacagagacaaaacagccttacttcaggagatgccatttaggactttcacagctctaggtaagctaatatctgacttcaaagattcaaaggacgggctgactctttactttgtagagacagcgtcacgctctgttgtgctggctggtcttgaactcttgacctcaagtgatcctccaacctcagcctcccaaagcactggaattacaggtgtaagccacttttcccagcctgggctggctttcttgttagaggtcaatgcagttggtgactttaaatgaatgctaatattcaattaccattccaaaaatccaagagccagttaagaattatgctacatctactcttcctgtggtatctatttacatctatttacagcatggtttactgaatattttaagcccactgtaaaacatactgttcagagattcctttcaaaatattaccactgataatgaacctactaaccaagagctcttatggaggtataaacaagattggcgttttcatgtctgctaaccgcagcccatggattctggaataattctgactttcaagtcttattatttaagaaatacatttcataaggctatagctgccactaataatgcttcttctgagggatctggataaattaagttgcagaccttgcagaaaggattctccattctagatgccattaacaacatttatgattcatggaaggaggtcaaaatatcaacattaaggcaggtgtggtggtgtgtgcctggagtcttggctactcaggaggcataggaaggaggatcacttgaggccaggagttcaaggctacagtgtgctctcatcgtgctggtgaatacccacttgtactccagcatgaacaacacagcgagaccttgtctctaaaaaaaatttttttaattaaaaaaataaaaaccaacattaaccagagtttggaagaagttgattccaaccttcataggtgactctgaggggttcaagtcttcagtggaaaaagtaactgtggatgtgatggaaaaaagagaactagaattagaagtggagcctgaagatgtgacagaattgtttcaatctcgtgaaaaaacttgaacagatgagaggctgctttgtatagataagcaaagaaagtggtttcctgaaatgaaatctactcctgaagatgctgtgaacattgttgaaaagacaacagacttagaatattacatcaacttagttgatcaagcagtggcgaagtttgagaggattaagtccaattctaaaagaagttccactatgcgtaaaatgttatcaaacagcgtcgaatgctaaagagaagtttttcatgtaatgaagagtcaatcaatgcagcaatcttcactgctgtcttattttaagaaactgccacagccaccctgatcaacagccatcaacactgaggcaagacctaccacaagcaaaaagattacaactcaccaaagtctcacatgatcattagcactttttggcaataaagtattttaaactaaggtactttacttagacataacacaactgcacacaagagactaccatatgatgtaaacctaacttatatgcactgggaaaccaaaacatttgtatgattcatgttattgtgatattcactttatagtggtagtctggaacaaaactcacaatatctacagggcatgcctgtatcttgtatcaatagggtttctcttctccattgcaacatcttatatacttagaaaggcctaaggaaataatgagggctttctgtgttttctacattgtatggccccatggtgagttctcaaatgttggattgtgaccacaatccaatcccttgagaaaagaatgtgtattaacaacgacttacaaaaaaaaaaaaaaaaaaaaaaaaaaaaaaaaaaggccaggagcagtggctcactcctataatcccagcactttgggaggccaaggcgggtggatcacctgaggtcaggagctcgagaccagcctggccaacatggtgaaaccccatctctactaaaaatacaaaaattagctgggtgtggttgacggcacctgtaatccaagctacttgaaggctgaggcagaatcgcctgaacccaggagacaaaggttgcagtgagctgggatcatgccattgcactccagcctgtgtgatgacaacagcaaaactctgtctcaaataaaataaaataaaataaaataaaataaaataaaataaaataaaataataaaaaaagattccattggctccctaacattcctaaaatttataggggacacatagagtatgagttctttcatgtcttcgaagtgaatggggataactgaaggcctcctcacattctttgtaccaataaaatttctcttcagtgtgaattcaaatgtggtaattatggtatgagaaattcctaaaagatttccacattccttacattcagagtttttcttcagtgtgtttttaaatgtttagtaagtaaataaaatctattgtaggctttcccacattcgttacatatatagggtttctctccagtgtgaattctaacatgtttctgtagatgtgaagaagcacggaaggttttcccacattccttacatatatacggtttctctccagtgtgagttcttatatgttcaatgagttgtgaagatgtagcaaaggctttcccacagtccttacattcatagggcttctctccagtatggatttttacatgattatgtaagcttgaggaaacagtgaatgctttcccacactccttacatttatagggttttattccagtgtgaattctaaagtgattcttaaggcatgaagagcttctgaaggattttccacataccttacattcaaagggcttctcctctgtgtgagttttaaaatgttcagttagtagataaaacctattgtaggctttcccacattcgttacattcatagggcttctctccagtgtgtattcgtacatgtttagtaaggcctgagcgcccagcgaaggctcttccacattccttacattgataaggtttctctccagtatgaattcttacatgttcaactaggtgtgaagaaacagtgaagcatttcccacattccttacattcatagggtttctccccagtatgggttcgcatgtgactattaagatatgaagaatatctaaagaattttccacattccttacattcgtagggtttttctacagtatgcattttaacagacacagcatggcttgtggagtaagtaaaagctctcccacattgcttctgttcatagagtgtttctccattgtgagttatcctatttgcctgaagatgtgactgatcaacaaaggcttcctcacagtcactgtattcaaaggatttgtctcctatccacgttctctggtgaacatttggtggcaggctgaaggcttttctgcactgattcaacacagaaagtgtctctccagcaggggcactgttgtgtaacatgggaaagttttctccatactcatcacagtcataagtgtcccctgtattttcagttcccatgtgtgcattaaggcatgagtgttcactgaagatttctccattttccataaagtcacagagttcccctccattgtggatttctgcctgttaataaagggatgaatgatgattaaaggatttttcagatttatcaacagattttacccatctgaaatcagacagtttattatgattataatttttgccattttcattacatgcatacagttgctgccccatgtatttcttacaagttgaatgaagaaaacctactggcaagaaccctgtgccatttgctctaagaaccttgaaataattcctgtatattttcatgaaattgtttttataatctagctacatatgtgataatttgtacttgtgagaatgctgaagcaccaagttttaagataggattaaggtatccccaaatgcattacatttagagtatccctctagagcagaggtccccaacctttttgctaccagagactgatttcgtagatgacaatttttccacaaacaggggtggaataggggtgggatagggatggtttcagcatgattcaacaacattacatttactgtgactttatttctattattattacattgtaatatataatgaaataattatacaactcaccataaaataggatcagcaggaggcctgagcttgttttcctgcaactagacagtcccatctaggtgatgggagacagtgacagatcatcagtctcataaggagcacacaatctagaaccctcgcatgggtggttcacagtaaggtttgtgcttctatgacaatcgaatgctgctactgacaggtggagtatatgacaggcagtaatacaagcgatggggaatggctatacacacagatgaagtttcgttcatctgccacttacctcctgctgtgcagcccagttcctaacactaacagaaacagtaccagtggggacccttgctctagagacattcctcctgcttgagtaaatgttacctctctcaaatatctctcatttttgctgattttttataattgaatcccaatctttttttgagtgtggtaaataagaaatcttaatcttaccatttgtatgccgtttgatgttttgttaagccaaaaaaaaatgttgttgaggtgctgacactttggttttaacttgccattctgaagtaaaacagaaaaaaagaaaaaaaaatagggtctgagaacaaaacagtaggttaaataagtcagaattataaagctcatttttatttgtcatattcagcacactcaaaaaaattaaacagacatagatttgaacagtttatccatgacgaacatttggcaatcgtaaggacttggggtctaaacttagtaattttttttttttttgagacagagtctcgctctgtcacccagactggagtgctggagtgcagtggcatgatctcggctcactgcaacctccacctcctgggttcaagcgattctcctgcctcagcctccgagtagcttggattacaggtgcccaccaccaggcccggctaatttttgtatttttagtagagacggggtttctccatgttggccaggctggtctcaactcctgacctcaaaagatccacccgcctcagcctcccaaagtgctgggattacaggcataagccaccatgcccagcaatttagtaattttttaaacaatttattctatagaaattaaatgagataatgaacagaaatagtattagggaaggaaaatagaaatgatctggataaagagcacacattaaagtcataaacaaaaagataaaagagcactcatttgcaaaatcacatgaaagtctgggttagatgaaaaagagaggaatatggaaagttgaagataccctaaaacttccaagtccaatggccccatgttctgtgacaaagtacatcttttaaatatatcttcattatgcttccaaacatactgaacttctcattgaccaggagtgttcttcatactcaccttggggaactccggttggcaatgtgctcaacttttccttctcctcctccagtcaagagacagactgagtttgaataggtcctgtacagagggaaagatacatcaatggaagaggcttatgaaggaaatgacaaacgtaaccaagaaaaaaacaactatattcctaaagagagtagtgaaactattttaaaagagctcaaatttcatatatctcatccttttgtgccctgaggagttggttatctctgaccaaatacccactattcagacttaaatacacatttaaaaaccattaaagactgggcgcagtggctcatgcctgtaatcccagaactttgggaggctgaggtgggagaatcacctgagcctggggaggttgaggctgcagtgagtcatgattgcaccactgtactccaacctaggtgacaaagtgagaccctgtcttaaaaaaaataaaataaaaaccattaaaacgtgtattcaaataggaaataatccaagtgcaaagagagatcattattttgttttctggttttgtttttttttttgagacagagtctcactctgtcacccaggctggagtgcaatggcactgtctcaactcactgcaacctccacctcccaggttcaagtgattctcctgcctcagcctcgtgagcagctggggttacaggcacccaccatcaggtctggctaatttttttgtatttttatagagacagggtttcaccacattggccaggcttgtcttgaactcccgacctcaggtgatccgcccacctcagcctcccaaagtgctgggattgcaggtgtgagccaccacgcctggccgagatctttttttttttttttttttttacgatatcgtcaaaagctcgaatattgtgtcttttgtagcttttcttatatcatgggtagtattacatctctctctctctctcttttttttctttttgagagatttttgctctgtcccccaggctggagtgtagtggcacaatcttcgctcactacaacctctgccgccgcccaccctagttcaagcaatacaaaaattagcagggcgtggtggcacgtgcctgtagtcccaaccactcaggaggctgaggcaggagaatcgcttttactcaggaagcagaggctgcagtgagccgagatcatgccactgcactccaggctgggcaacagagcaagattccatccaaaaacaaaagaatcagagagcttctttaggacacccctgaaataaagttatttcttatgttctcagggctgaaattgttataattaatgaggctcatatgccagagcttccctggcataatgtgaaggagggaatcctagagagacaggagtgttgcactggatttactatgtgtcatctgtatagcccactcccccgccctttgttgacagagcagaagacactctcttcacaaaggttattaagagagtagtggcgggagtgtcgtaatccttgaaaagctctgttggtattctccttcataggacaggtatgactgcaaagaataccatcactgagatgagttccctgggtttttttgtttgtttgtttgtttttgagacggagttttgctcttgttgcccaggatggagtgcaatgacgcagtctaggctcactgcaacctccgcctcctgggttaaagcgattctcctgcctgagcctcccaagtagctgggattacaggcacctgccaccacacttggctaattttttgcgaggggggggggtatttttagtacagacggggtttaaccatattggccaggatggtctagaactcctggcctcaggtgatctgcccgcctcagcctcccaaagtgctgggattacaggcgtgagccaccgcacccagccgagttccctgctttcaatcgagatgaaggggacccagaatagcagaaatcaagaaggtagtatttaatcaccaaacacaaggtgagaaaatcaactatcaaggacagtggaaatgtaccagtaatcagaatgccctgacctacagagatctgtggtggtggctaactgatcgtgctgtccctagaaatgaaatagataagcagttaacaaagcctactctaaagagccacaaaatatatgttaggcattatgggccacatggtctctgttgcagctactcaactctgctgttgtagcatggaaaataccatagaaaatgtaaacaaatgaacacggttgtgttctgattaaactttatatacaaaaaacacatggagagacagatatggcccatgggccatagtgtaccaatctctgtacttgaatactgctccatctatgtaaaaagtctaaactatagtagccaaaaactggatttatcccagtggagaatcataacctgtcactcaattaccacactgaaatcattcataaatcatgaacttaggtgatcactccaattaccgccatttttcaaaatgtaatgcctttactagataaatcaacataatttctgtcacttggtatgcaggcattgacatagctaatgtcttttctccataccaatttgaaaaaaacaagacttggttacctttcacctggcaggaccaacaatgtatcttcataacattgcccctagaatgtgtcagttctcgaggtctctgtcgtaacttaatccccagagaaaatgacattccatgaaacaccacactagtacactatgttgacaccattatactgatcatatccaatgaataggaagtagaaaacacatttttaaaaattagagacagggtcttactctgtcacccaggctggattagagtggcatgatcatagctcactacaacttcaaacttcaaactcccgggctcaagcaatcctcctgcctcagcctcccgagtatgtgggactataggcacatactaccatgcctggctaattgtttttctttttctttttactatagacatgaggtttcactacgttgcccaggctagtctcaaacacctggtctcaagcaatcctcccacgtcagcctcccagtgttaggattacgggcatgaatcattgtgccctgcctgaaaataccttagacaactttattagaagcatgcagcatttacggttccaaaatggtagtacagaagcaagctggtttcaatcccctgacagaaaactacaaccaaatgcatattgtgaaaattatcaccagcaatatccctgatctaaaatataaaaattaggcagtttctggggctacaaagaagtgaaaaaactccaagggagacgttaagagaatcaagtttccaagaatgtggaaaatttctaccaattcacagtttctacactggaaaaaactgagatcaatgtggacaaccaccttctccatcatcctgggttccctggtaaaagatcagtccctccctgtctcaacccacaggaagcattacaaatgcctgaagggagaaacatccctgaggacatccagggacaaagatgggaggcaggactaccatcccagccctggaaactctgttttataacttggccaaaggagaagccaagtcagagtggctgttcaggagcaccatactgtaggggtacgctacacaggtcacctgggcatgaacacacagccagccttcccacagtgctggaatatgccctttaggactccctcattctgaatgggcagtattcttgatagtttgctatagcaaaggcaaacgtgggtttaagattccatctagtgctgaaaacgaggcagtgacctagggaaattttaaagaaagaaaatcactttcggaggctgagacaggcagatcgcttaagctcgagttcaagaccagcaacaagatgaaaacccatctctactaaaaagtacaaaaagtagccaggtgtggtggcgtgcacctcacctactcaggaggctgaggtgggaggattgcttcagcctgggaggtagaggctgcagtaagccatggtcacaccacggcactgcaacctgggtgacagagagagaccttgtctcaaaacaacaacaaaaaagataaaaagaaaacatacccaataaaaaccacaagccagacaaagactgtaataaataactaatccttcaatgcacagacacagatgtacatccacaagaaacaacagcaaatggggaaccacgacctcctaaaatggacgaaaatagtatcagtgactgaacctaatgaaatgacaatatgtgagctccctaagaattcaaaataacagttttaaggaaattcagtgatctccaaaataacacagaagagcaactcagaaatgtatcagaaaaaactttagaatatattaacaacaacaaaaaagagaaatcttacaactgagaaatactcaactcaaaagttcacggtagaggctctcaacagcaagatggatcagaggaaagattcactgagcttgaagaaaagctatttgaaaatatagccagaagagaagaatgaaaaggaactaagattgtcggcaagatgcagaaaattaccttgaaagaccaaacctaggaatcactggtgttcaagagggaatgcagcaagtgcaaggggtaagctttgaaagctttattaaggaaataacaagattccaaaaattgagaaaaatataaatatccaggtacaggaaggtaagatgacaccaaacagattcaatccaaatgagactactacaaagcatacaatcttcagactctcaaaggtcaaggacaaagacaggaccttaaaagcattaagagaaaagaagcaaataacatgaaggactccagctggtctggcaacaggatttctcaagggaaaccacacacaggccagaagggagtaggatgacattttctttctttttttgtgagacggtctcactccgttgcccaggctggagtaccgtggcacaatcatggctcaatgcagcctttatctcccaggatcaagccatactctcacatcagcctcccaagtaactgttactacaaatgtgcaccacaatgcctggctaatttttctttctttcttttttttttttttttgtagagacggggcttcaccatgtttgaaatgcttgtttcccggtgccgtaaagaaatagcacttgaacataaattttatttctttagcaaggccattttaatttatttatacatttttttgagacagagtctcattctgtcgcccaggctgcagtgcaatggcgcgatctcggctcactgcaacctccgcctcccaggttcaagcgattctcctgcctcagcctccctagtacctgggattacaggcacattccaacatgcccggctcattttttgtattttttgtttttttagtagagacaggttttcatcgtgttagtcaggatggtctcaatctcctgatcccgtgatctgcccgccttggcctcccaaagtgctaggattacaggcacaagccaccgcgcccggccctagcaaggccatttttacactttctgcagaaagggtacactccccagcagatttgccatgagagtacaccgaacaaaggagacaggttcatttataacctgacgcatccaccctactgctgtgtccagtttccactggctggaatggaacctcacattttgtacttgttttgattggcttagaactttttaaaaggcgtaaaggcagaggagaagaaaggaaggaggaagtaacttgtggaatgctgagaaaggcaaaaacatcttcaaataaggaataggaacaggctatgacctaatgcttgcttggaccagtataagcatgccagggcaaatatttaggctaaattgtgggagctaagaacataaagtacattgatttctttattacagctagcagatatttaagtatgttaacacaggtctttgaataagttttgcttctaaaaagaagttatttattcctcattagatggaaaaaaaaaagtctttaaagaaaaatgtctactttactttttacaaccaagttgcccaggctggtctcaaagtcctgagctcaagcaatccaccaggctcagcctcacaaagtgctggaattacaggcatgggccaccttgcttagctatgggatgaaattttcaaagtgctggaagaaaaaaattgatatctaagaataccgtattcaggtcagcacaatgtctcatgcctgaaatcacaacactttgggaggctgaggtgggcggatcacctgacatcacgagttagagaccagcgtggtcaacatggtgaaacccagtctctactaaaaattaaaaaaaaattagcctggtatggtggcacatgcctgtagtcccagctacactggaggctgaggcaggagaatcacttgaacccaggaagcggaggttgcagttagccgatattgtgccactgtactccagcctgggcaacagagcaagatttcatttcaaaaaaacaaaaacaaaaagagataaagaaggtctctatagctgggagtagtggctcacacctgtaatcccagcactctgggaaggctgagatgggcagatcacgaggtcagaagttcaagaccagcctggccaacatggcaaaactccatctctactaaaaatacaaaaattagccgggtgtggtggtgtgtgcctgtaataccagctactcacgaggctgaggcaggagaattgcttaaacctgggagatggaggttgcagtgagctgagatcacaccactgcactccagcctgggcaacagagcaagactctgtctcaaaaataaaaaaaaaagaaggtcactatataatgataaaggggtcaattcagcaggaggatataacaactgtcaatatttatgcacccaacactggagcacctaagtatataaagcaaacattaataaatctaaagggagatacacactgcagtgcagtaataatagtaggggatttcaacaccccactctcggtaatggacagatcatccagctagaaaatcaacaaagaaacacagaagaagttaagcaataaactaaaccaaaaaggcctaacacaggacattttatccaactgctacagaagatacattcctttcctcagcatatggaatattctccagaacaggccatatcttaggccacaaaaaaaagtcacaacaaattcaaaaatgtagaaatcatatcatcttttctgaccacaagggaataaaactagaaatcactaacaagaggaaccttgattcacaggctcaaagtggtggctcatgcctataatcccggcactttgggaggccaacatggggagactgcttgcacccaggactttgagaccaccctgggcaacacaaggagaccctgtcccttcaaaaaaaaaaaaaattacacaacggaacattgttttggtacgttgacatatcaaaatccatggtacaaaagcacacagaaatttggaaattaaaatatttcttgaaacaaattaaagtgaaactacaacataccaaaatctatgggataaaagcagtactaagggagtattttacagcaataaacacgtacatacaaaaagtagaaagatttaaaataaccgaatgatacccttaagatactagaaaagcaaaaacaaatcagactcacaattaaatcaaaaggataaagaccacagccaaaataaacaaaattgagaataaaaaacaatacagaatattaataaaacataaagttgattacttgaaaagataaacaaaatcaaccaacctttggctagactaaggggaaaaaaaggacccaaataaaataaaaaatgaaaaaagaaaacagaacagaaaccacagaaatacaaccaatcattagaaactattacaaaaaactatatgccaacaaattgataagcctggaagaaatggacaaattattgggcgcatacaacctaccatgattgaaccatgaacaaacagaaaacctcaacacaccaataacaagattgaagccgtaacaaaatgaatcccatcaaagaaaagcccagaaactgatggcttcactgctaaatcctaccaaaaactgaaagaataacaatacaactcgaattcctcaaaaaaaattgaagagaagagaatatttccaaacttggtctacaaagtgagcattattctcatatcaaaagcagagaagagcacaacagcaacaaaactacaggccaggctgggtgcagtggctcacgcccgtaattccagcactttgggaggctgaggcgggtggatcaccttaagttaggagtttgagaccagcctggccaatatggtgaaatcctgtctctactaaaaaaaaacacaaaagttagctgggagtggaggcatgtgcgcctgtagtccctgctactaaggaggctgaggcaggagaatcacttgaacccgggaggcggaggttgccgtgagccaagactgagccattgcacttcagcctgggcaacagagcaagactccgtctcaaaaaagaaaaataaagaaaaagaaaaaaaaaagtaaccaaaaatgtgaaggagctatgcaaggaaaactataaaacactgatgaaacaaactgtagaggatacagaaaaaaaatgggaagatattccatgctcatggattagaatattgttaaaatgacaatactacccaaagcaatttacaattcagggcaacccttctcaaaataccagtgaaattcgtcacaaaaagagaaaaaaaatcctaaaatgtatatgcaatcacaaaagacctcaaacagccaaagaaatactgaccaaaaaaaacgaagctggagtggccaggtgcagtggctcacacctgtaatcccagcactttgggaggccgaggcaggtggatcattaggtcaggagttcaagaccagcctggccaacatgatgaaaccccgtctctactaaaaatacaaaaattagccagctgtgggccgggcgtggtggctcacgcctgtaatcccagcactctgggaggccaaggtgggcagaccacgaggtcaggagatcaagaccatcccggctaacatggtgaaatcccatctctactaaaaaaaaaaatacaaaaaaaaaaaaaaattagcctggcgtggtgcctgtagtcccagtggtgggtgcctgtagtcccagctactcagaaggctgaggcaggagaatggtgtgaacccaagaggtggaacttgcagtgagccggaacttgcagtgagcccagatcacaccactgcattccagcctgagtgacagaacgagactccacctcaaaaaattagccagacatggtggtgcgtgcctgtagtcccagctactagggaggctgaggcaggagaattccttgaacctgggagacagaggttgcagtgagccgaggtcgcaccactgcactccagcctgggagacagagcgagacttagtctcaaaaaaaaaaagaaggaaagaaaaagctggaagcatcaaactgcctgatatcaaaatattctacaaagctaccatagccaaatcagcatggtactgacataaaaacaaacacatagatctatggaagagaacagagaacctaaatataaatctacacatttatagacagttcattttcaacaaaggcaccaaaagcatacaatgggaaaatagcagtcttcaataagtgctgctgggaaaactgaataacgatatgcagaatgaactagatgccatctctcagcataaacaaaatcaaaacagattaaagacatctaacacctgaaactataaagctactagaggaagaaactggggaaacaatccaggacattggtctgggtaaagatttcttgggtaagacctcaacagcacaggcaacaggagcaaaaataaacatatgagattacatcaaactaaaaacttctccacagcaaaacaatcaacaaactgaagagacaatctagagtatgggaaaaaaatatttacaaactatccacctgacaaagattagtaatcaaaatatataaggaactcaacttgatagcaaaaaaaaaaaaaaaaaaaatccgatcaaaaaattggccaaaggtcagaatacttgtttctcaaaaaacgacatacaaatggccaacaggtatacggaaaaaatgctcaacatggctaaacatcaaagaaatacaaatcacacattaccacaatgagatgtcatctcacctcatagggtggcttttatagacagggaataacaaatactgatgaggatgtggtgaaaagataatccttgtatgcagttgatgggaatgtaaattagtacagccactatagagaacaatactcaggtgtagtggctcatgcctgtaatcccaaaacttgaggctgtggtgggaggatcacttgagcccagaagttcgagccagcctggacaacacaggaagacctgtctgcacacatatgcacacataaaacctgtcagtcacagtggctcatgcctgtaatcccagctctttaggagcccaaggcaggtgaatcacttgaggtcaggagttcgagaccagcctggccaacatggcgaaactccatctctactgaaaatacaaaaattagctgggaattgtggcgtgcgcctgtagtcccaggcaggagaatcacttgaacccaggaggtggaggttacagtgagccgagatcatgccactgcattccagcctgggcaacagtgagactccgtctctagaaaaaaaagagaggttgattcatgggtaaaatacacagttagaagaaataagaactagtgttcaatagatcagtagggtgactacatttaacactcatctattgtacatttcaaaacagctaagagaataacttgattttcctgcaataaagaaaggataaatatttaaggtgacagatattctacttaccctgatttgataatataaatgcatcaaattatcacatgtactcagaaaacatgtacgtctattatgaatcaaaaaactttttttgaattttcaaatagagggtgggagattctggggccaccatgtctgtgggtaaagatattcccttgtcagccaggcgcgggtggctcacacctgttatcccagcactttgggaggctgagacgggcggatcacgacgtcaggagattgagaccatcctggctaacacggtgaaacctcgtcaatactaaaaatacaaaaaattagccgggcgtgttggcgggcacctgtagtcccagctactcaggaggctgaggcaggagaatggcgtgaactcgggaggcagagtttgcagtaagcccagtttgtgccactgcactccagcctgggtgacagagaaaaactagtctcaaaaagaaaaaaagaaaaaaaaaaagatagatattcccttgtctggatcatgtaaagacattccctacaaaaagacattccctgcaagatgtccctccaagttacttcacctaataccacctaccactaaaaacgagcaatgagccatgattatgccattgccctccagcctgggtgatccagcaagactcaaaaaagaaaaaaaaaaaaactcagtatgggggtttctcaaaaaactaaaaatagaactgtcaatagagctaccacccgtaaacctcttgaattttggaggcaacatatacatttgtatgtgctttaacgccccacacagttgcctgtaaggattctagtttcaactgtagacaagagcaatttcaggctgcactgcaggcttcccaagcacttggtccacctgatccagcagacccaatgatactcaacgtgtccatgttaaatggcatcctatttattggaagcctctggcatacaccaacagaagatgtagagtagaggcctctggtattccatagtcaatccatgccctcttgtgcagattaactgtttctcttttgagaaacaggttgtggtttgccactaccatgcgatagagaatgaacaactaatcatgggacatgaagtaactaaggcagatctgagtaatttgagactttctggtccccaaagcacgaagtacatactgtcagcccttatcaaacaaaggttgtcagcttctcctttaggccaaaaaccccgagtttgtaggaaatcgcatgaaataaaggaatatttacacacaccatgagaatccaatcagaaatatctgattgtatgactttctaagagaatgagtgttaggaataacgctcaaaatcctaaggaaattgaacactcgaacaaaggattcttagcaaagcaattttacttctgtgcagaggggtgcctccttgaccagttgccatgagagcacacctgaacaaaggggcatgagagcctttactcctgatgcaagtcctgcccctgtaccctttccctattggccggggtcaggtcgtacaatctaaactaatcccggttggtgaaacacctgattttttttagatagggtgggcacgtagaagaaaagtggagaggaaggggaagggatgtctgtagtgagctagaaagtcctctttctaagtaaggaaaggtatgtgagctggtactgataacgctttgtactgtggcatgcctgggcatctaacaaaggcaaaaaggagaaaaaaggagaaaaagggggggtactatgaattagagaataaaagattgatgagattatttgaagagaaacctcatcatatcctcatatcccacagtgtgactctccaaaagtcaatataatatacaataataactgttctaggtaaaaagacactgaaaacattaacaattgcaatgtaaaaatcttgaatggatcttaaacccaaaaacatccaagagcatacgttgaatcaatgcggagaattttagttattataaaaagcagacattagatgacattattattttttatttaagtgaaatactagtattgtggtttcagaatgacagtgctatttttttaggcgatgcattaccaagtatttaaaggtcaagtatcacgtgtgcaattatgctcaatttacactcaaattgttcaccataaaatgtatttacctgaggtgaaagaaaacaagcacaatgctcaaaaagtaagtgttcaggcacagtggctcacacctgtaatcccagcattttgggaggccgaagcaggtgaactgcctgagctcaggatttcgagaccagcctggccaacatggtgaaaccttgtctctactaaaatacaaaaaaaaattagctgggcatggcggcatgtgcctgtgtcccagctactaggtgtcaggcctctgagccgaagccaagccatcagactccctgtgacctgcacgtatacatccagatggcctgaagcaactgaagaacaacaagaagaagcgaaaatagctagttcctgccttaactgatgacattccaccattgtgatttgttcctgccccaacctaactgatcaattgaccttgtgacattccttctcctggacaatgaatctcaggagctccccactgagcaccttgtgatccccgcccctgcccgcaagagaacaacctcctttaactgtaattttccactatctacccaaatcctataaaactgcccgacccctatctccctttgctgactccttttctgaactcagtctgcctgcacccaggtgattaaaagctttattgctcatacaaagcctgtttggtggtctcttcacatggacgcacctaatgctagggaggcaggagaattacttgaacctgggaggcagaggttgcagtgagccgagatcgcacctctgcaccccgacccgggtagcagagcgagactctgtctcaaaaaaaaaaaaaaaaaaactactagactgggtgtgttagatgttcaagttttccctaggatcaaatttttcagaaaaaaatgtcaaaactacacttagtctaaacatgctgttaataaattcaatagatactactttattacactaatactagaataatattctgattataaagcctccatcctggccaggagcggaggctcacgcctgtaatcccagctctttgggaggccgtcaggcggattacaaggtcaggagttcgagaccagcctggcgagcatggtgaaaccctgtctccactaaaaatacaaaaaaaaaaaattagctgggcatggtccccatgcctgttgtccctgctactcggaggctgaggcaggagaatcacttgaacccaggaggtggaggttgcagtgagctgagatcgcgccactgcactccagcctgggcgacagagcaagactccgtctgaaaaaaacaaacaaaagcctccatcctttcttcctgtgggcccgttttgaagctctgtgggggggtacagacctaggaacttcagataaagacaacagctgtgtattattgcctttctttcttttttgagacggagtttcgctctcatcgcccaggctggagtgcagtggcagatctcggctcactgcaacctcggcctctcaggttcaagcaatcctcctgcctcagcctcccaagtagctaggattacaggggactgccaccaagcctggcttttttttttttttttttttttttgtgtgtgtgagacggagtctccctcttttgcccaggctggagtgcagtggcgcgatctcggctcactgcaagctccgcctcccgggttcacgccattctcctgcctcagcctcccgagtagctgggactacaggcgcccgccatcgcgcctggctaattttttgtatttttagtagagacagggtttcaccatgttggccaggctggtctcgaactcctgacctcaggtgatctgcccgcctcgacctcccaaatggctgggactacaggcgtgagccagcgcgcccagcctgcctttcttttgtagaaaggcttgtagctggtaacaacaaaaaacattaagtccaagaaaataaaataagaaactaaaggctcacagtctacacgtgttcatatttacatgcagatataggcacaccctaaacgactattttttttccatcagaaagtaatgtgtcaaaaataagaataggacatcaatgccagattctcagacgagacatttttaagcaaagaaatggaagtcagagccctcttgaaaccaattttctgcaggtgttcaccaggaacatgccggaaacgccaggttcctgaggcgcggaaatgcggggccggagccaacctgactggaacggcagaaatccttttactttcagaaagaaagaaactcacaaaggttgctttccaagcttttgaagaagggagcacagcggatgaaaccactccagaaaacgcgcggagtcgggacaaacacacttcccgacctggctcctgactgggacccactgagcctgcggcctctagccactggccgcgcaaggaggaccgacagcccctggagaagagagtgaaacgaggcggatcggagaggctcctgggcgacagcacccaatcgttcctttgccgccccccgctatctccgggatccccaagcaggcggaactcaccacagccagggtggactccaccacgataaaggcgaaatggcactgaccatgcggagccagcgccggaaaagatggcgattgtgcgctgacgtcacttccgctccgagcctcgggccgggcggggctcctgggttcgagtttcagccacataggacccagtcaaacacagaaattgtagtttcttcccgggtgggcgcggacaggcccttacttgggggcggtttagaggtgggacccggctagccggcggttcaggtggccggacctgctggaagggcgggcgtgggggatgggacgcaccccaggggatgctcctgcagagcttttcccaggtgggcacagtggctaaggcctgtaagtccaacactttgggaggctaaggcaggtggatagcttgagtccaagagttcaagaccagcgtgggcaaaatagcaacatcctttattaaaatatatatgtgtgtatacatatatataaagcttgtttgtatacatctcatgttcctagagcctttccatgattcttccatatggataaagctgccagtgaatggcatggtctatctcttctattcagtcaggctttctgtaggcctttatttcttcattctttattttttagaacctgctggttccattgcgttttcttttttcgtttttctttttcattttttatttttttttgagacagatctcactctgttgcccaggctggagtgcagtggcatgacctcggctcactgtaacctctgccccccgggttcaagtgattctcctgcctcaacctcccgagtagctgggattacagatgtctgcctccacgcccagctaatttttgtacttttagtagagaagagtttcaccatgatggccagactgatctcgaactcctgacctccaatgatctgtctccctcagcttcccaaagtgctggaattatagacatgagccaccgcacccggccacgttttcaatataataatattttctgtaaatcttgatttttttttgtcttcatcaagtatgtatttctggctgggtatggtggcttatgcctataatcccagcaatttgggaggccaagggatcgtttgaggccaggagtttgagaccagcctgggcaatacagcaagaccccgtctctgtttaaaaaaaattttaaatatgtttttgtttttgttttgagatggagtctagctctgttgcccaggctggagtgcagtggcacgatcttgctcactgcaacctctgcctcccgggttcaagcgattcttctctctcagcctcctgagtagcagagattacaggcaggcgccgccatgcccggctaatttttgtatttttagtaaagacagggtttcaccatattggcccagttggtctcgaactcctgacctcatgatccgcctgcctcacctttccaaagtgctgggattacagatgtgagccaccacgcctggccaaaaacatgtatttctattgttatttttctgatcttcccacatgggccaggaccacatttcctacattgtaaaatagcactgacaccagacattctccccaggtttattcagaaatgtaacataatcccagtaaaaatattaaaagttttttctggagttaggtacgttgatactaaagtttatgtggaagaataaatatctgataataaccaagaaaacaaaaacaaaagcaatgatgagcagcagatgttaaaacatactattaacagttttcacacaaggcaaataattaaattatattaaaataaaaataaataagacatactataaagcctctataattaaaactatgtggtactagcacatgaagcagaaacagactaataaaatatctaaaaacagacccaagaacatgtaggaatttggttcataaatgtggtattttgccaggcgcggtggctcatacctgtaatcctagcaatttgggaggctgaggcgggaggatcacctgaagtcaggagttcgaaaccagcctgtccaacatggtgaaaccctgtctctaataaaaatacaaaaataaaattagccaagcatggtggtgggctttctgtaatcccagctattcgggaggctgaggcaggagaatcgctgaaacccagaaggcagaggttgcagtgagccgagatcgcgccactggactccagcctgggcaacaagagtgaaaatccatctcaaaaaaaaaaaaaaaaggtatttcagatcaatgaggcaaaaaaagccatttgtaatggaaagtctaagacagctgggtagccatcagagaaaagatgaaattaaatccatacttcacagcatatacaagaataaactctaaatggactagggatctaaatgtgaaaaataaaaccatatacgcattcagggtgtaagtgatttcttggctgagtaaggaaaaagacgtgaccacaaggcggcagtagcacacaagcttcatttgggatgtgctttgacaggtaaggagtggcgggaggtagcaaacagcaagagaatatccacaggcttctacctgtgggtcgctgctcagaaagggtggaaaggaagaaagactcccagaggagaaggggaatcaaagagggggcttatatgactaagtgacgatgctcagcagcctggcagcatatcttccagttaaaaagttctgaaggacaagtctggccaacatggtgaaactccgcctctactaaaaatacaaaaattagccgggcatggtggcgggcgcctgtaatcccagctactcgggaggatgaggcaggagaattgcttatacccgggaagcggcggttgtattgagccaagatcgcgccattgcactccagcctgggcgatagagtgagactcagtctcaaaaaaataaaaataaaatatgtaattatctgttcattctgagtacagggaaacactgataggactatcctgaaaataataagattcagaatctatcggggatagatgggaagggcttgaacagaatggtgggataagaacaaaatggagaggatagggatagggaaacctctctgagcatatcattctgtttagttctgatgtttaaaatcacattctactttttttttttctttttgacagggtttcactctgtcacacaggctggagtgtagtagcgttatcattgctcagtgcagcctttactttgtgagctcaagtaatcctcctgcccaagtaccagggaatacatatgtacaccaccacatccagctaatttttaaaaatattttgggtagagaagagatctctctatgttgcccaggctgctcttgaacttccagtctgtcacatataaagttttggtgccacaaaagaaataacacttgaatataaaattttctttttaattctcagcaaggcaagatacttctatagaagggtgcactctcacagatggagcaatggtgggcacacacctggacaagggagggaaaggggttcttattcctgacacacgtggtccctactgctctgtcgttcccctactggctagggttggacctcacaggctaaactaattccgattgactaatttaaagagagtgatggagtgagcggtttgggaaaagggtgctttatgaggaagttaagtttaaaagtagaaggcaaagaattgagcatactgacatattaattctttgaagagaaatttataattcattttcaacaacttcctcctcttgcattttttttatggctttctcttcaaacttatttaacatgtcttgacttagttgttctgcttgattttccaaaagaaggagcttctctggataaggtggaggatagttaaaggaggttttagtaagtgccatttctatgagcctctgcaccaacctacagatgcatggtatgacacggcacctgacaaggataagtacacccattacggctacaagggaggtgagaattgaggctattattcctttccatttaccgaaccacttttctagccattctgtaaatgggtaatttacccctgaattgctggccaactcattggatagaggagtcaggccttgcaatgcctttcttatacttccattaggggccgtgttgtttgggatgaagttgcaacaatgagttttaataatgatgcaaactcctcctctttctgctaataccatgtctaaagctatcctattttcccaagccatcaggttagtagcccccaattgctcagctattcctttaacagcatctctagtgtagttaataaatcgctgttggttgtaatagatgtagtttacccaatctacatttttttttttttgagatggagtctcactctgtcacccaggctggaatgcagtggtgcgatcttggctcactgcaagctccgcctcctgggttcatgccattctcctacctcagcctcctgagtagttgggactacaggcacctgccaccatgcccggtgaattttttgtatttttagtagagacagggtttcaccgcgttacccaggatggtctcaatctcctgaccttgtgatccgcccgcctcggcctcccaaagtgctgggattacaggcatgagccatcgcgcccggcccacccaatctacatttttattaactgtcgcctaccaaaatattgacttaaatcctgcagctattggattttgggctttaaattgatctggtattccccgtgggactccaattgcatctaaatagccgtgagagttgaaagacctataacgggcttgtcttgctttacgaagtcttatctttcctccctctggttgctgaaatgccagggtgaaagggatagccaattggactaaagcacaagtgccactccagttattcagcagagtgtccagtaaaggtccaccacaataccaccacacatccgctcagggatgagcaagggctgactgattggtaagctcttgaaagttcttaagctcactgcatcccttcaggtctccaaggaacactaagtttcctctctgttgtgagagacacgaagtgaacttaatgttgggagatggaagctggatggccctcgggggctgaccagcatgttgttgaacttcaggatatagcagagacagagagtcggcatgactctttaccctaggctgtagaatcctggaaaagagttaccatgcagcccatgcccggtctattggagaaccaccctagtggaaaggggacaatctgggcctctggcctgctgtgcgcactagcataacaattgcttttgtttaacatgcggatggaatatttgatccattccaaccaggtatttacatcttggtatcctgtctcaattgccaaagtttaagtctttaacttctaccatcgctatcatggccttgtccttagatggaggaggaacaatggttccgttgtgagaggttttggaaaaaggctaagaggcaggtgcaggcagcgggagatcaaagaaacgcatttcaaagaatccagtagggtctgtccttgaaacctcagcccctataccataaaaccggcttaaagaaaggaactggcttagaaaaggagaactttggggctcaaaatactaacctgtatagggttgcactggtttggctgacagttggggggggctgtccctttagtaaatgaatgtatggttttaggaaattccaaaaactggttagggcagtccatccttgctctttggtggtccacagaacgttggaccaactacggcataaaagctctacatcgggggttggggtcaagactcctggtttccactgggatctttatggaaatctcccagattaaatggtcctaattcactaatgcccagtctgaggagagccaggagggacagaggtgcttttctgaagtagtgagctgcctttgacttgacaaatccccacagggtataacaaggcaagcattaaatgcaacagtttgaggcaaaattgacttggttatgttaataactagatggtcagcaacagagcgaggaaagaagaaagagtaatagaatagatgaaagacagttaaattcttcttagctttagtttggtagggttttcccctgggactatggcccaccactctggaggtggtggcgcgttcttgactctggtgtgatgagtccatcctctctctgccgtgcggactgcggtttcagtagtgaggagcagtaagtaatgagattcccaggctggctcaggcttctcctctttccagctcttgatgaggacatgatccccaggctgatgatgcactgggaactctaagggtggcacctgtgctaatagacctttagttttaagagaagagagaatagaagatagacaaagtatataatttttaaggattgatcttttgtttcaaaggtaggaatatcagcagtggagtgcaaataaggtaatccatagagcatctcataaggagaaagaccaacgtctttccgtggtgcagtttgaattctcagcagggcgataggaagacacttggtccatggcaatcgagtctctaagactaatttggttaagtggttctttagagtctgattcattctttctactctccctgatgagggtgggtgccagggagtatggtgttcctatttaatgtctaatgtttgggatagctttttaataatgtgtgtggtgaaatgagttccattgtctgagtcaatattttctattagtccaaacctgggtactatattttcaattaaggccttaactacattattggctgttgcatttgaaaaggggacagcttcaaccaagtgagtgaggtagtctactatcactagtaaatattttagacgacctattggaggcatttctgtgtaatcaacttggatactttggaatggccttaagcccagattccttcccccgagaggtaatctttttatagtatgtctattagttttcttacatactaagcaactatctgtaacctgtttggccagagtataaattcctatataactataaactctgagaactgcatcacacatggcctggggcccccagtgggtctcatgatgtagttaggataagacttccctcataaggggtttggacaacatttctctctggtctgacagcatccactttccttctgaattctctttagcgtctatgtttattagtttctcttttttggtggaagagaaaatggggattatggtaggaggagggaggtagggagttaagtgaaaaatatgcatttcagaagacacagcagcctgcttggctacctgatctgctaggttatttcctcgactttcaaaagaggtttttctgttgtccgggaacatggacaatagttattttttccggcaactgaagattattcaatacttgggtgatcagctccttgtgaacaaggtcttgacctttactattaatgagaactcgttcagtccaaatttttccaaatgtatgagccacttcaaaggtgtacttagaatcggtatagatagttccctcctggtcctgtaagtactttaaggcttggctgagtgcaaacagctcacacatttgagcagaccaactgttgggcaatttttctgactctatttctatgagagtttctccatcaatcactgaatacccattgtgtctttttccctcaatcacccaggaggaaccatctatgaataagtgccctccagtccagaagggggtttctcctaggtctggtcgaacctttctatggtaatcaattaaatctaaacatgtgtgttctctccttagatttggattccctgtaggaaacctgctgggttgagtgaattatcagtggtcagtgttaaaccatccttttttttttttctttttttgagacggagtctcactctgtcaccaggctggagtgcagtggtgccatctcaactcactgcaacatccaactcccaggttcaagcgatcctcctgcttcagcctgccaagtagctgggactacaggcgtgtgccaccacgcccagctaatttttgtatttttagtagagatggggtttcaccatgttggccaggatggtcttgatctattgaccttgtgatccaccagcctcggcctcccaaagtgctgggattacaggcataagccaccatacccggccataaatcatctttttctaacagaatggcctcatactttaagattcttgagtcagtaagccatctccctgctctatggtttaagatagttctaacttggtgaggcgtgcttactgtcaattttcctccaaaggttaactttctgctttccttgactactattgctgtagctgcgatggactggatgcattgaggccatccacaagtgactgggtctgaggcttttggtaggaaggctacaggctgtcggcagcctccatgctcttgagtcagcactcctaaagttatcccactgtccacattaacaaaaaggtggaatggcttttccagggagggttaggctaaaacaggggcagttatgagcctttccttcagcttctcaacttgatcaacttcctcagaagtccacaggagacagttaggtttctcctgagcaagtttttgatataacagtttactgtgcagtgcatatgagtcaatccaaaagcggcagtatctaactaatcctaaacatttcctgagttcttgtttagtttgaggcaagggtagggacacaattccctcaattcgttcaggccctattcttcacttgtctgcacttattaagtggcctaaatacttaacttcgggatctacatactgaagctttcttgttgagactcgtagcccctcaaactacaggtgattaagaatatgtgtagagaagtcagttaccttctctatatcttcaccagatataagaatgttgtccacgtactgaagaaggtatatttgttctgggatgacaactttttctagtacttgttctaaactttggccaaaaagattaggggagtctgtgaacccttggggcaagactgtccatcgatattgttgtttccaccctgattggggatctcagctatcttcagccaggggacatgcccaaaaagcattcttcaaatctattacagtaaaccattgatgattacatgaaatcttgttaagaatagtgtaaggattggggacaacggggtgggtagtctggactatttggttgatagctctacagtcctgtactagccgatatgacccatctgatttcttgactggcagtattggggtgttttaaggagacatacagggctggagaagcccgtccttaataaggcctttgattataggtttcaaccttatcctgccttctaggggaatagggtattgtttccttcttactacttctcctggggtttttagctgatgtggattggagggacttggagtttcccttagtctccttctttggaccagacattaggattaatatatttttcatccgcagtggtgagtaggtttaatggggtgaagaattctcttgggctgacttgtagacctatgcccaactttaacattaaatccctccccaggaaattagttcctgcttcagggattaacaagaactgaatataagctgagcgatcctggtgtctaacttctgtgctttgtaaaatttttgctctaaatccttccccttttaccctggaaactaaaagttcctctgaggaggagccaacattagatggggggaaacaaacaggagcgagcagcccctgaatcgactaaaaaggcgataagctcatgtttaggtcccacatccaaattgatcaagggctcctggtgggactcaagataaaagagacagggcccctgacccccctattccttgaaagtcatgagtggaagggcttctttctccttagttcaggacattctctcttgaagtggcctgttcttccacatctatagcacatatcttgtccttcctccctcttagttctgggattctttaaccctgtccccccatactctttagggggcctggtagatgaggacctttgtcctccagatggaggctgggggcctttaaaacagggttcagaccctttatactttctaggtccctggaagctctgtctagaagtacctgggtttggagccatctgttggaaggtggaaaacataagttttgttttttgtttctgtttttcttcatcccgtttcacatgtactttctaagcttccctgagaagctcacttagaggacggtcttcccaattgtctattttttataacttttttgaaatgtctaggcaacttttactgacaaattggagtttcaacattccttgcccaaggagatcatccaaagtaaggcctgcatattgcctcatttgctccctcagtctgtctaggaatctcacagtcccttcatccttttcctgttgtatatcaagcgctttagaaagattgcgggttcagggtactgattcctgatttccttttattatcatctcccttaggtcctgcatattttcccggtgatctgcgttgttattgtcccaccgggggtcttgggtggggaatttctgttccgcggtaggaacgtttttaccgggagggtgctcacgttccctaagtaccatagcagccctaggaatcatactccttttttcccctgaaaagaggacggccaagatggacattaactcgacccaagtgtaactgaggtcctaagaattggtcaatttggtctgccactctgtaaaggtcatctagtagtggtttaagctcctttttaaaattccggacttctgaactggttaagggagcatttacaaagccaattacaaagccattggcccccactccttgtggtacctctttcaaagggaataaggtcagggctgacctcttaggtatggagggaagcggaaaattctgagtatcttttttacattgttctacctcacgctggagtccttttagagaggggtatttaggttggggggaggacaggctggtgggatggtaattcccaagagtcagggttataaggaggagggataacacgagtagagggggagtttagaatgggatctgaggtggaagtggctgtctgaggggaaagattggggatactgaatggaggaagatagtttaggggatcccatgcactggagtctttaggcatgagatctggctcctctgacttttcattttgaggtgccagattgggttcttccctatttgtttttaagggaaaaaggagggctggtccttgcctccaacaaagggcatagcgtagttcttcttgagacactggacttttattattaacatatcagattggaagctgacacattacatcctcagttgattcaaactttggccagaagattgaggaattaaggatgggtccctgagtccaaataaaacagcaatattttattatttgttgctttttcctatgtttagtcctttcattatccttccagtgtttcagcatgagacctagggggctatctgggggaatatctttgttaccatctttatcccccttgctccctgtcttgcttggggtatttcccatcttgatggttttggggtaaggttcaaggttcagtttcccttactggaaatttctcacctttcagggtgaggcttaattttcactggaaactttttgccttttggggtaaggctcaatttcccctctggaaatttcttgccttttctactattggaggtttgtgtgaggttcaatcccccccaacaatggggatgtctcacctctttttaaccacttagccaccctgaccaaggagtacttcactgcacccacccccaacccccgtggctttcttaccttgttcctgaccaccaaggaaatactttactggctcctgtggcatctccttccttggtaggtgcacagagtcatcactgcagtatgtgaggatcctttaagctaggttgctggccagttgtttttttcctgcattgcttagagctagggttattcctcacaatgggtgggttctgatttctcccctatgaggccaccacaaagggtggggtgcatgcctcctcaagagagagaaccagagaccacccccagaggggaatgtaatcctggatgagcccccaaattgttatataataagtttcagtgctgcaaaagaaatagcactcgaggccagatgcagtggctcatgtctgtaattccagcactttgggaggcctaggtgggtggatcacaagggcaggagatcgagaccatcctggctaacacagtgaaaccccatctctactaaaaaatacaaaaaatgagccgggcgtggtggcgggcacctgtagtctcagctactcaggaggctgaggcaggagaatggtgtgaacctgggaggtggagcttgcagtgagcagagatcacaccactgaaccccagcctggacaacagagtgagactccatctcaaaaaaaaaaaaaaaaagaaaaagaaatcgcattcaaatataaaattttatttttaattctcagcaaggcaaggtacttctatagaagggtgtgctctcacagatggagcaatggtgggcacacaccttcacaaaggagggaaaggcgttcttattactgatgcacctggtccctactgctgtgtcattcccctattgggtagagttagaccacacaggctaaactaattccaactgattaatttaaagagatggacggggtgagtggtttggcaggaaaaatggttatgaaatgaattggaatgaatgagtcagggtggagaaggtaatctgaatgagcagaatgagtcagggtggagtaggtaatgagtcaaggagtagaatgtgtcagggtggaaaaggttgctttacgaggaagtttaaaagtagaaggcaaagaattgagcatactgacatattaattctttgaagggaaacttcgaattcacactcaacaactctaaagtgattctctatccttggcctcccacatttcttttttttttttttgagacagactctcactctgttgccaggctggagtgcagtggactgatctcagctcactgcaacctctgcctcctgggttcaagtgattctcatgcctcagccccccaagtagctgggactacaggtgccagccaccacgcccagtgaattttcgtatttttagtagagacggggtttcaccatgttggccaggatgctcttgatctcctgaccttgtgatccacctgccaaggccacccaaagtgctcagattacaggcatgagccaccatgctcagccttggcctcctacattgttgggattacagacatgagccactgtgcttggccctttattcctttacatatttaatattttaaaaaattaacaaagaggccaggcacagtggctcaggcctttaatcccagcactttgggaggctgaggtgggtggattacgaggtcaggagttcgacaccagcctggccaatatggtgaaaccccatctctactaaaaaatacaaaaattagctgggcatgctggtgcgtgcctgtagtcccagatactcaggaggctgagacaggagaattgcttgaacccaagaggcagaggttgcagtgagccaagatcgctacactgcactccagcctgggtgcagagactccatctcaaaaaaataagtaaataaataaacaccacacccaatcagctcaagcctgtggctagagataagaatgcagaaagaattggccaggcgcggtggctcacgcctgtaatcccagcactttgggaggccgaggcgggtggatcacgaggtcaggagattgagaccatcctggctaacacagtgaatcgccgtctctactaaaaacacacacaaaaaaattagccgggcgtggttgtgggcacctgtactcccagctacccaggaggccaaggcagaatggagtgaacccgggaggcagagctcgcagtgagccgagatcacaccactgcactctagcctgggtgacagagcaaaactgtgtctcaaaaaaaaaaaaatctagaaagaatctagagacatctttcctgcccaagatagtgttttcctcctacttcctttaaactgactatccatgtatttgctcctaaatttaaagtgactcacaccctattcccttatgtatacagctagctgccacaacctccctccttctctgcctctcatccctgccttgcgtgacccatggatggaagactgtcctcaaaactcattttgccctcccttcccaggacgtgtaagcaataaatctttgaaattatgtcctattggggtggtgttttgaatttgcacataccatctgaagaaccaggggccgcccctggttgagatttccccagggagctggtggggacacaaggtcaggtttccagtgtcagagtgatgatcaggcaggcataaactgaacacaggtcagacaagagcagctatgtcgctgggcacggtgactcacgcctgtaatcccagcactttgggaggccaaggtgagcggatcacctgaggtcaagagtttgagaccagcctggccaacatggtgaaacctcgtctctactaaaaataccaaaaatattagctgggtgtggtggcatatgcctgtagtcccagctactcggggaggctgaggcaggagaactgcttgaacccaggaggcggaggttgaagtaagccaagatcgggccactgcgctccagcttgggagacacagggagactccatcttaaaaaaaaaaaaaaaaaaaaaaaaaagagcggcctaggtcatctatcagtataaacaagtttcccaggtgagggaccccctgtcaaccaggttttgcgtgacaactcacactgtaatcccagcactttgggaggctgaagcaggcagatcacttagctaaggagttccagaccagcatagccaacatggcgacaccccgtctctactaaaaatacaaaaattagcccagcatggtagtggaggcatgtaatccaagctacttgggaggctgaagcaggagaatcgcttgagctctggagtggcaggttgcagtgagctgagatcacgctactgcactccatccagcctggatgacaaaggcagactctgtcattcatcaatcaataaataattaattaactttaaaaaatgtatcccttaggccagtcgtggtggctcactcctgaaatcccagcactttgggaggctgaggcgggcagatcgcctgaggtcaggagtttgagaccagcctgaccaacatgatgaaaccccatctctaataaaaatacaatattagccgggtgtcgtggttcatgcctgtagtcccagctactcaggaggctgaggcaggagaatcgcttgaatccaggaggcagaggttgcagtcagccaagatcaagtcattgcactccagcctgggcaacacagcaagactccatctcaagaatgcaatggaatggaatggaatgaatggaatggaatggaatggaatggaatggaatggaatgggccgggcatggtggctcacgcctgtagtcccagcactttggaaggccaaagcgggtggatcacctgaggtcaggagttcgagaccagcctgaccagtatggtgaaaccccatctctactaaaaatacaaaaataaccccagctacttgggaggctgaggctggagaattgcttgaacctgggagacagaggttgcagtgagccgaaattgcgccactgcactccagcctgggcgatagagggagactccatctcaaaaaaaaaaaaaaaaaaaaaaaagaatagaatagaatagaacagaatagaatagaatagaatggaaataatgctgagtgcagtggctcacgcctgtaatcctagcactttgggaggctgaggcaggcggattgcctgaactcaggagttcaagaccagcctcagcaacatggtgaaaccccgtctctactaaaatacaaaaaaaaaaaaaattagccaggcgtggcggatgtgcctatagtcccacctacttgggaggctgaggcagaattgcttaaaccggagaggcggaggttgcagtaagctgatattgcgccactgcactccagcctgggcaacagagcgacactctgtctcaaaaaaaaaaaaaaaaattaaattaaattaaaaaaaaaataggctgctgggcgcggtggctcacgcctgtaatcccagcactttgggaggctaaggcgggtggatcaacaaggtcaggagatcgagacaagcctgaccaacatggtgaaatctcatctgtactaaatatacaaaaattagccggacgttgtggcatgtgcttgtaatcccagctactcagaaggccgaggcaggagaatcgcttgaaccccggagaaggaggttgcagtgagccgagatcgtgccactgcactccaacatgggagacagaacaagactccaactcaaaaaaataaataaaataaaaataaacaaataaataaataaaataaaatgtatcacttgaaagaaaggctccctgtaaacacccacatctggctccccttcatttcttgttagggcagcattgctagtcactctgctattggatccttaatataggtaggggctcaagacagaccaaaacggaaagaaaaaaataaacaagaactgacccaagtaacttctggggttttttaaaatttttttattttttattttattttatttttttgagacagagtcttgctctattggccaggctggagtgcagtggcacaatctcagatcactgcagcctccacctcccaggttcaagtaattcttatgcctcagtcggccgagtagctgggattataggcacatgccaccacacccagctaacttttgtacttttactagtgacagggtttttgccatattggccaggctggtctcgaattcctggccccaagtgatccacccaccttggactcccaaagtgctgggattacaggcatgagccactgtgcccgggcagtaacttctgttttattgtatttctttttactgtgataaaaagcacataaaattgacaagtaacacattttttttttttttttttgatgcagggtcttgctctgttgcccagcctggagtcagtaattcaatcatagctcattatagccttgaactcctgggctcaagcaatccttctgcctcagcatctcaagtagctgggactacaggtgtgcaccaacatgcctggccaggttttaaaaaatttttgtggagacagggtcttgctatgttgcttaggcaacaggctgaaactctgtctctacaaaaagtaccaaaaattacccaggtgtggtcgtgcatgcctgcagtcccaactactggggagtctgaggtgggagtatcacccgagctcacgaggtcaaggttgtagtgagccacaattgtgtcacggcactccagcctgggtgacagggtgagaccctgtcccccagaaaaaaggaagaaaaaaaaaaaccaaagtcttagaagtataactctttttagaattgatatgtaaagctgggctcagtagctcatgcctgtaatcctagcattttgggaggccaaggcaggcagatcacctgaagtaaggagtttgagaccagcctagtcaacatggcaacaccccaactcaactaaaaatacaaaaattagctgggcaaaggccaggtgcagtggttcacacctgtaatactcccagcagtttgggaggccgaggtggggggatcacaaggtcaggagttcaagaccagcctgaccaacatggtgaaaccctgtgtcaactaaaaatacaaatattagctggacttggtggtgcacacctgtaatctgagctactcaggaggctgaggcaggagaatcacttgaatccaggagaaggaggttgcagtgagcccagatcgcatgattgcactccagcatgggcgatagagtgagattctgcctcaaaaaaaaaaaaaagttaaataaataaatacaataaaataaaataaattagctgggcgaggtggcacatgcctgtaatcccagctactcaggaggctgaggcaggagaatcatttgaactggggaggtgaagggtccagtgagccaagatcatgccactgcactccagcctggatgacagagtgagatcaactaaaaaaaaattgatatgtaatagttgtacactattgccttgaatgcctggcctcaagtaatacccctggctcagtgtacttagtagttgcaatggaaggaatacagcacctaaactcaagagtttttttgttttttttttttggtagagatggtatctcactccattgcccaggctattctcaaactcttgagctagaatgatcctctcttctcagcctcccaaagtgctcagattacaagcatgagccaccattcccagcccagacatttttacattacatgaaattttcaaggtccagttggtcctaattctccataaatcctttcagagtattaaaaatgaagcaaattttgctaaagctttttatgatgccagtacaagatatatgtatatcttgtttctatcactgataaaaatagtacaatcattaaaaactgcagaatcatatcagtaatgaatattgctacaaatgtactaagtaggccgggcacagtggctcacgcctgtaatcccagcactttgggaggccaaggcgggctgatcatgaggtcaagagattgagactatcctggccaacgtggtgaaaccccatctctactaaaaatacaaaaattagctgggtgtagtgtcgcgtgactgtagtcccagctactcgggaggctgaggcaggagaattgtttgaacccaggatgcagaagttgcagtgagccgagatcgcgccactgtactccagcctggcgacagagcaagactccatctaaaaacaaacaaacaaacaaaacaaacaagcaaaaaaacaccaaaaaacaaacaaaaaaaatgcactaagtataatagaggcaggattgcttgagcccaggagtttgagagcagcctgggcaacatagcaagcgactatctctacaaaaaatttaaaaattagctgggtgtggtagagcacccctgtactcccagctacttgggaggctgaggtgggaagattgcttgagcccaggaggtcagggctacagtgagctgtgtctgcaacactgcacctagcctaggtgataaagcaagatgagaggggaagggaggggggggaggggaggggggaagaaaagaaaggaaggaacgaagggagggagggagggagggagggagagagggggagagagagagagaaagaaagaaagaaagagagagagagagaaagaaagaaagaaagaaagaaagaaagaaagaaagaaagaaagaaagagaaggaagaaaggaaggggaaagaaagaaggaaagaaagaaaagaaaagaaagcaagaaagaaagaaaaggagagggagggagggaaggaagggtgaaaaagaaagaaagaaggaaggaaggaaggagaaagaaaggaaaggaagaaagaaagaaagaaaggaaggaaggaaggggaagggaagggaaaggaaaggaaagaaggaaaggaaggaaaggaggaaagaaagaaggaaggaaggaaggaaagaaagaaaaagaaagaaagaaagaaagaaagaaagaaagaaagaaagaaagaaaggaaggaaggaaggaaggaagaaaaagaaagaaagaaagagccgggtgcggtggctcacgcctgtaatcccagcacttcagaggccgaggtgggcagatcacctgaggtcggaagttcgagaccaggctgaccaacatggagaaaccccgtctctactaaaaatacaaaattagctgggcgtagtgacacatgcctgtaatcccagctactaaggaggctgaagcaggagaatcgcttgaacctgggaggccgaggttgtggtgagccgagatcacgccattgcactgcagcctgggcaacaagagtgaaactccgtctcaaaaaaacaaaaaaacaaaaaacaaaaaacaaaaaaagatgaaagaaagagagagagagggagggaaagaaagaaattagcaaacaaattccaacgccatggtaagaaagtagtaaacccagtggcatttactccaggaatgtaaggttggttctggctgatttgtatctttgtattagtgcattcaccattatggatgatgtgtggagtttgcccacagcaatactcaagaccctttcagacacatcctcccccaaaggggaacattcacctgttctcaggggtaaaactgcagcctcagtggaggacagatgaaaccctctgctctgacggactagagaatgcagtgggggatagacggcagcctcgccagacagcagtcaattctctggccctctgcaactctggatagggctgagtccctactttcaggtggggagagtcactctgggggcttcaagaacactcttctgtcagtccatccaaccaggttcaggagccaatggaagaaatctgagaaaggaaggggttctgttgaagatggcttttgagaatcactgaaataaatgcctggtaggtcttgaaattctaacttctgacgtattagtccattttcatattgctatgaagaaataacagagactgggtactttttttttttttttttttttttgagatggagtctcgctctgtcacccaggctggagtgcagtggcacgatatcggctcactgcaacatccgccttccacgtttaagtgattctccagcctcagcctcctgagtagctgggattacaggtgcacgccaacaggcctagctaatttttgtattttttagtagagacagagtttcactatgttggccaggatggtctcaacctcttgacctcgtgatctgcccacctcggcctcccaaagtggaattacaggcatgagccactgtgccaggcctttgttttgttttgttttgttttgttttgttttgttttgtttgagatggagtattcctctgttgcccaggctgaagtgcaggggcacgaccttggcttactgcaacgtccacctcctgggttcaagtgattttcctgtctcagcctctggagtagctgggatcacaggcgccagctaccacgcccagctaattttttgtatttttagtagagatggagtttcaccatgttggccaggatggtctcaaactcctgacctcaggggatccacccgcctatcctccaaaagtgctgggattacaggcgtgagccaccacatccggcttgataactcttatttttttgtagagatggaatctcactatgttgcccaggctgatcttgaactcctggcctcaagcaatcctcctgacccagcctcccaaagtgctgggaatatgtgtgtgagccaccatgatcagccagaatagacaacttttattattttttaaaatattttgtactattttttttcgagatggaatcttgctctgtcacccagagctggagtgcaatggcacgatctcaactcactgcaacctccgcctcctgggttcaggcaattcttcctcctcagcctcccaagtagctgtattacaggcttgtgccaccatgcctcgctaatttttgtatttttagtagagatgcggtttcaccatattggccagcctggtctccaactcctcacctcttgatctgcccaccccaacctcccaaagtgctgggattacaggtgtgagccaccatgcccagcacgtagtatttttcagtagagatgtagtctcactatgatgtccaaggtggccttgaactcctgggctcaactgatctttttgcctaagccttccaaagtgctgggattacaggcctgagccactattcccagcctagattcttatagcatatagatggataaagaatttagaaaaagtaggaacattccccaatacagtatatgacagtcataatttacatgtaaatatcattcagggccgggtgcagtggcacacacctgtaatcccagcactttgggaggccaaggcagttggatcacgaggtcaagacatcaaaaccatcctggccaaaatggtgaaactccatctctactaaaaatacaaaaattagctgggcgtggtggtgcatgcctgtagtcccagctccttggaggctgaggcaggagaatcgcttgaaccggggaggtggaggttgcagtgagcctagatcgtgccactgcactccagcctggacacagagccagactctgtctcaaaaaaaaaaaaaaaatcattcagggacaagaagaaaaaaaaattgcagttattcaaacatagctccataacatattagtaaaggtaatcaaatagtcttttaaaatgatccattatgtctcagttgggcttatccaggaatgcaaggttgatgtaacactagaaatgtaataaatacaaaaacacatttattttattttatttctgatggagtctcactctgtcaccaaggctggagtgcagtggcacaatctacacttaatgcaacctccacctcccaggttcaagcgattctcctgcttcagcctcctgcgtagctggaattccaggtgcacacaaccacacccagctaatttctgtatttttagtagagatggggcttcaccatgttggccaggctggtctcgaactcctgacctcaagtgatctgcccatccctgcctcccaaagtgctggtattacaggcatgagccaccacacccaacctgaccacatttattttagagatgagtccttccatgcattcattcattcgttttgttttttgttttttgagatgtggtcttgctatgttgtctaagctggtctagaacccctgggttcaggccatcctcccaagtagctagaactatagacatgcatcaccacatcatttcattgaagtatttattacataccatcattggccaggaacagttctaggtacttgagttctagcagtaaataaacatgatcatcacagaggatgcacaggaagcatttaataaattcaagaggaattcagcctcatgaattatgaaatactgggaaatcattcatcatgtaaaaactggatataaaaagaaacctttcctgtaagagattagcctcttcaaaaaataaaataaaaacctacagccaagccaataaaatagagcacgtatctcagcagaactgcagacaattatgctggtattactgctattcattggtggtgtgctggaggttgaaattagtccagtaaagcaagaaaatatatatataggtataacctaacgactaaagtggaaaagtaagagtcattatttacagattatgtgattgtctatgtggaaacggaaaagaatcatattaagtactttggactgaatgataaccctgaaaattcatatgttgaagctccaaatcccaatgtgactgtatgtgaaaatagggttttttagttttgtttttgagacagagtctcgctctgttgtccaggctggaatgcagtggctgcgatctcggctcactgcaacctgtgcctcccaggttcatgccattctcctgcctcagcctcccgagtagctgggactgcaggtacccgccaccacgccaggctaattttttgtatttgtagtagagacagggtttcaccgtgttaactaggacagtctcgatctcctgacctcgtgatccgcccacctcggcctcccaaagtgctgggattacaggtgtgagccaccgcgcccggcctgaaaataggctctttagaagtatcgtgaaatgatgtcaagagatgggtagggggagggagggggagggaggggaaggagagagatggtggggagagagagagaaagaggagagaggagagaggagaaaggagagaggagagagagacctatttgttggtttccttcctgtgaagacatgaggaagtgggcatttacataccaggaagagagctctcgccagaagttgaccatgctggcactctgatctcagacttccagcctcgagaaatgtgagaatataaatttgtttttaacctcatttatttaaaattaacaaatttgtaagccatttggtctgtggtattttgtgatagtggcctgagctcattaaggcagattaaaaacaaacaaacaaaaaaactaaaaatgtgaagcagatttgaaactgacaaatgaggctggaaaaattctgatgtgcaagctggaagtaaggttggtaagggtgatcctggtgaggtgtcattggggaatgaggaacatgctattgggaaataaagaaaatacaacccttgatacgaagtagtgaagaacttggcagaactgtattctagcactttgcggaaggtagagcttgagagagataaaactggttatgtatcactaagatctgtacttaaagtgttaaaggacacaggaagcttcattcttcctgagtgcttacaggaaaatgtgctcagaacaggccccccaaatttggacataaacaggccatgagaaactgcccataaacaaaatctctgcggcactgtgacatgctcgtgatggctatgacacccatgctggaggttgctggtttacccgaatgagggcaaggaacacctggcccacccacggtggaaaactggaaaactgctcaggcattcctaaaccacaaacaataccatgagtgatttgtgccttaaggacatgttcctgttgcagataacaagccagagcctgtccctttctttcttgtaaggaatacttttagctaatctataatctatagaaataatgtttatcacaggcttactgtcaataaatatgtgggtcaaactctgttcaaggctctcagctctgaaggctgtgagccccgattcccactctgcactctatttctgtgtctttgtcttaattcctctagagctgctgggtcagggtctccatgacccagctggtctcagcaaaaatgcaaaaggagacctgaattgcagaaaaaattgttaaggaaaaaggaaccagaacttggagatttggaaaattctcagcctatccataatgcaaaaattagaaaacttgtactgaagagaatcctcaaagtgtggctgaacgatcatctgataaagagatcatgagtgggattcatggactatatcagccaccttgacagaagtgagaagagagactggattatactagaagagacattgccacttacattgtgccatctaaaatagacatacaaggcagaacaggcaaggctgtcacacttcttagattttacaaggggacacagaaataatcagctgtgaaagggcactggcagttatggatggtttcattcctgacacgctctgcaggatccgtgggatcagaagagacccttggaggagcatctcttaacaacccacctttggggtcctacatcatcttggcttctggtaaattttgacataaatgtgccacactggcagccactaaccaacaggggctggggtcaatctgcatgatttatctcatacacaacttgttaatgctatgatcttaggaatctaatcaccaaggtgaggcagcctgcagtactgacctcaccatccatgacccttcttcacagatgcccagactcaggcaaccatgatgttgtattcagaacctgtaggtttaatttcagaccctcaggatggtatctaaggccaatccatgagtcattacaacctccaaaaggcatttaggacaaatctgataatctttggtgtcattgccaataattaaagatggcaaccgatgggctaaatggtaacactcatatccttgcattcatagggtttctccccagtgtgaattctttcatgtctacttaggcgtgaggaaacagcaaatgctttcccacattctttacatacgaagggtttctctccggtatgagttcgcaggtgaacattaaggcgtgaggaatatagaaatgctttcccacatatcttgcatacaaagggcttttctccactatgagttttcaaatgtttactacgacgggaagaagtaatgaaggtcttcccacattcaacacattcataaggcttctctcctgtgtgaattcttgtatgctgaataagacttgtggatgtagtgaaggctttcccacattccttacactgatagggtttctttccactgtgacttcgtatgtgtatagaaaggcccgagtactgagcaaaggcttggccacattccttacattcatagggttttattccagtgtgagttcttacatgttcagtaagttgagttgatctagtgaaggctttcccacagtaagtacacttgtgtggttttattccagtgtgaatttgaatgtgatcattaaggcatgaggaatttctaaaggatcttccacattctttacattcaaaggacttctctcctttatgagttttcacaggtgcataaagttgagaaaaattagtgaaggatttcccacatttcttagtctttttggatttctttcctgtatgaactgctacacactgctttaggtgtgaagaagctgtgacagctctcccatattcctgaaattcacagagtttctcatcagtgtggattcccatatgattatcaaggcttgcaaaatacttaaagccttttccacattccttacatttgtagggttgtcttgcattgagaacttcaagatgtacagcaagacctggagttagagtaaagacttttccacatggattaaatttggaaagttcctgtccagtagaggcttccttgtgcacactgagggtgtcttttccataacaattaccctcagaagtattccctccattctgaactctcatgtgtgtcttaaggcaaaactgttccctgaagacctctccacaattcttacagtcacagagtttccatccactgtagcctcttgtctgttgatgacgagataaaggttttaaaacattttcagacatattaagagatttcacccatctgaacacagaagcattttgatgacaattatgattttactttttaatatttaatttttttttctttttgagagaaagtcttgttctatctccctgtctggagtgcatggcacactctcagctaacggcaacctccacctcccaggctcaactgattctcctgcctcagcctcccgagtagctaggaatacaggtgtgcaccactgcacctggctaatttttctgttttgtagaaacaaggttttgccaagttacccaggctggtctcaaactcctaagctcaggtgatctgcctgcctcggcctcccaaagtggtgatattacaggcatgacccaccacacccagtatgtttcacttttttcagagttggggttttgctccattgcctggactatagtgcactggtgtgatcatggctctctgtaacctcaaactcctggctgagttcaagtgatcatcctgccttagcttcctgtgtagctagaactatttgaatgcaccctcatgtctggccaatctttcagtttgtttgtttatttatttatttagagacagagtcttgctctgtagcccaggctggagtgcaatggcatgatttcggctcgttgcaaactctgcctcccaggttcaagtgattctcctgcctcagcctcctgagtagctgggattacaggcatgggtcaccatgcctggctaatttttgtagttttagtagagacagggtttcaccatgttggccaggctggttttgaacccctgacctcagatgatctgcctgccttggcctcccaaagtgctgagattacaggggtgagccaccatgccccacctcagtttatttatttttgagatgtagtctcactttggctggagtgcaagtggcgagatcttggctcactgcaacctccacctcctaggctcaagtgattctcatgcatcagcctcgcgaatagctgggattacaggcaggtgtagccacatccagctaattttgttattttttgtagagatggggtttccccatgttcgccaggctggtcttgaactgctgacctcatgatctgcctgcctcaacctcccaaattgctgggattacaggcgtgagccaccacacccagcctcaatttatttttatagagacaaagtcttactatgtagcctaggctgatctcaaactcttcacaaaaccccactgcctcagcctcccaaagtgctgggattacagccatgagctaccatgtcagcctactttgataattataatttttacaatttttcttccttgtttttattccctgacttcttgatttcttccagattgaatgatgggcccttttgccagaattctacgccactggctctaattgttcaaaaaaagaaaactgtagggtttttttattattatgcagggtggtttgagacaaggtctcactctgtcacccaggctgggtaccatggcataatcacagctcactgtggccttaatctcccaggctgaagccatcatcctgcctcagtcccccaaggagcttggattacaggtgcatgccaacacgccctgctaattttttattccttgtagagacagggtctctgttgaccaggctggtcttgaactcctaggctcaagtgattctcctgcctcagcttcccaaagtgctgggattacaggtgtcagccattgcacccagtcaaatagtgtagattttcatgaaactgtgtaaatcctcaatgtctagttacttatgtgggaatgtgtacttgtgggtattttgaggtgacaagttatacagatatggaatatcataaaattcatcacattcagactatctctccagagatcctgctccctcagtggtgcagaattcttctctaattctctcaagtatctctcatttgtgcagtttctttttcactgcaaactccacctcctgggtttaagcaattctgcctcagcctcccatgtatctgggattacaggtgcctgccaccacacctggctaactttgtatttttagtagagataagagtttcattacattggccaggctggtctcgaagtgctaatctcaagtgatccacgtgcctaggcctcccaaagggatgggattacagactcagtttcttttctttatttctgagacagagtctcactcggtcaaccaggctggaatgcagtggtgcaatctcagctcattgcaacctctgcctctgtgttcatgccattctcctgtctcagcctcccaagtaactggtatgacaggtgcccaccaccacactcggctaattttgtattcttagtagagatggagtttcaccatgtcggccagcctggtctcaaactcctgacctcaagtgatccacccatctcggcctcccaaaatgttgggattacaggtgtgagtcaccacattcaccttctttttaaaatcagagatgggatcttactatactgcctaggctggtcttgaactcttgggctcaaatgagacccccacttcagcctcccaaatagctgggattacagatgtaagccacacctctgactgagctgattttctagaatggaattctctatcttttctaagagaggaaattaagaaatatccctcatgaatcttaccatttgtatcccactgaatatttgattcttcaaaaaaccctgctgaagtgatgaccgtttggttctaggttgtatttcccattctaaagttaagcagaaaaagaaacgtaaggatttagagaagaaatattcatttaaaatgagtcatttttacttgttttcaaattaaacacagcaataaaataaaagccagagaaccttgaggattttggtacatcaaaaatttggctataatgatgtggggtttattacataactgatgtgtttagatagtttattacaaactacttctgtaaaaattaaaaatgccgggagtggtggctcacacctgtaatcccagcactttgggaggctgaggcgggtggatcacttgaggtcaggagttcgagaccagcctgaccaacatggagaaaccccatctctactaaaaatacaaaattagccaggcatggtggcgcatgcctataatcccagctacttgtgaggctgaggcagtattgcttgaacctgggaggcagaagttgcagtgagctgagatcatgccattgcactccagcctgggtgacagagcaagacttcagaaaagaaaagaaaattaaagctgatggaaaacagaaagagtagattttcgggaaaggaaagtaggaaagatctagataaacagcatgtatcagaatgataaagttaacaaagaaacagaacaggtagttttattagatcataggaatgtttgacaagatggaaaataagagtcaaagatatccaaaactctgagaaaaatagcttaaatcttctgaggcaaagtgcatctttaaaaatcttttttttttttttttgagatgaagtgtcactctgtcacccacactggagcgcagtggcacaatgttggctcaatgcaacctctgccttctgtgttgaagtgattctcctgcctcagcctcttgactagctgggactaaaggcgtgtgccaccacgtctggctaattttttgtatttttagtagagatggggtttcacagtgtaggacacactggtctcaaactcctggcctcagacaatccacccacctcagcctcccaaagtgctgggattacaggcatgagccaccacacctggccaggagatatatttctaatacaagcaatgtaattattacaaaagggatataaaagctaagatctccatttctgtgcccaaaaaagattggttatctctgacccattaaacccaaattcagacttatgtacacacctgtaaagcactaaaacttttatttcagtaagaaataaagtaggctgggtgtggtggctcatgcctgtaatcctaacactttgggaggtcgaggtgggtggatcatttgaggtcaggagtttaagaccagcctggccaacatagtgaaactccttctctactaaaaatacaaaaattagctaggcacagtgacacttggctgtaatcccagctactcaggaggctgaggcaggagaatcacctgaacctgggagggcagaggttgtagtaaacagagattgcaccaccgcactccagcctgggcgacagagcaagaccctgtcacaaaaataataaataaataaagtaagtaggctgggtgcagtggcttacaccataatcccagcactctgggaggccgaggtgggtggatcacccgaggtcaggagttcaagaccgggctggccaacatggcgaaaccccatctctactaaaaatacaaaaaaaaaaaaaaaaaaatttaactgggcatggtagcaggtgtgcctaataccagcaacttgggaagctgaagttgcagtgagctgaggtggcaccattacactctagcctgggtgatggagtgagactctgtctcaaaaaaaaaaagcagaaataaagttaagtactacaaaaagatgcttgctgtcatgggtaaacaactctgccactggatctcaaacatgatagtatattagattcaccttcagtgattctgaaaacacagatgactgggctccaaccctggagtttccaatttactacatcaaagaataggggaaggaagatgtatatttcttacagcacaaagctgatgctgttgatgaagtttccaggattaccacagtaaattaaaacatactacagcagggactgttactttgggactgtctctgttattccccactgttttcagaattgacaagcaagcatgtaacatacatctgccctataacaggctacaagaaatgatgctagtgtttatttttatttttaatgtatttttttttagacgaagtatcactgtgtcgccccggcaggagtgcagtggcgcaatctcagctcactgcaacttctgcctccttgttcaagcaattctcctgtctcagcctcccaagtagctgggattacaggtgcctgccaacaagtctggctaatttttgtatttttagtagagatggggattcactattttggccaggctggtctcaaattcctgaccgcatgtgatctgcccgcctcggcctcccaaagtgctgggattatagatgtaagccaccacaaccggcctagtcttcatttttaggatttttttttttgagatggagtctcaatctgtcacccaggctggagtgcagtggtgtgatcttggctcactgcaagatccgcctcccgggttcatgcaattctcctgcctcagcctcccgaatagctgggactacaggtacctgccactatgcccacctaatttttttgaatttttttagtagagacggggtttcacagtgttaggcaggatggtctccatctctggaccttgtgatccgtccacctcagcctcccaaagtgctgggattacaggcatgagccactgcgcccggcctagaattttttttttaagagacaaggtatcacaatgttgcccatgctagtatcaaactcccaggctccagcgattctcccacctcagcctcccaagtatctgggactacaggtgcaggccaccatgccaagcatagtgatgttactcttacccacagaggccaggttcatgtagttctccagcatcacatctctgtagaggtatttctcagttgtgtccagtaaagcccactcctctggggtgaagtccacagccacatcatcaaacgtcactgaatcctatgtcatcatacacatgctggtttgagccaatgaacacttccaccaatattcactggagaatgatgaaggggaaccttatactcacttacacgtggttgtcaggtctcccatgatctactccagggtttaatgtctcaggagctcttgtgtctaaacactcaaggttgacctcctacaggcatatgccttaaacagcactttttaaaatttttttaaatctttttttgctgatctatttttaattttttaatatttgtatttttaaattttaaattttatttttattttgattagaacagtacttcctaaagatgaattttcctctatctatcatctatctaatctgtttatttatttatatataaaaacagggtccaactgtgtcacccaggcacaactgctgattactacagcttcgatctcctgggctgaagtggtcctctcacctctgtctcctgagtagctggaattacaggcatgagccactgcacactgcttacgcttgatctcagcacaaccaggctaggagctcttcctgtcccattggtgtctatgcagcacactcctcagcacactgcagatacctgataaatgctgataagtgaatgatttgataaaaggacactttcatctgctttatcatccgtcaccgcacccagcaatgtaagaaagatgcagttggcaccatgaaggtcaagcttaagtagtaattactgagctactggactgattttcaagttaacattttatgtataggagacttcattccctggggaaattcatctggggactcagtccttgagtaaggcttcatttgctctaagaaaactctgaagatgagtctgtctagaaagaaatctgtctacctattggatgaaagcatatcatttttaacaacagtacgttttctgcttacctgataaccacttgccaggtagtcctccaccatcctttctacctttgtcttttcttcaaaagggcagattggttccctggaaaaaaaccctagtggaaaagtaagaaggcatgagaagccagagctgcccatccttcccacattctcatgcctagaagtcattccatcctagcttgaaattccgatatgctcctacacactcgagaaaactacacacacaacacttccatgaaatgccatagtaagtcctgtgtcagctagacacaaaagcagacttgggccaaactgcctgttgggtaaagggtaatagtttcatttttcaaggaaacttacaccctgaaaaatgtgactctcgtccaggtgcggtgcctcatgcctgtaatcccagcactttgggaggccgaggcgggtggatcatgaggtcaggagaacgagaccatcctagctaacacggtgaaaccccatctctactaaaaatacaaaaaattagccagatgtggtggtgggcatctatagtcccagctactcaggaggctgaggcaggagaatggtgtgaacccaggaggcggagcttgcagtgagccgagatcgtgccactgcactctagcctgggtgacagagcaagactccgtctcaaaaaaaaaaaaagtgactctctatctgcccatagtagtaacactcatgaagcttatgtagcatttcctaaggtacacaaaccagggctgaattctaaaacagcattctggctgggcacagtggctcatgcctgtaatcccaatactttgggaggccaaggcgggcaaatcacttgaggtcaggaatttgagaccagcctggccaacattatgaaaccccatctctactaaaaatagaaaaattatgggaggctgaggcagagaattacttgaacccaggagacagaagttgcagtgagtcgagaccacaggcactgcactccagcctgggagacagagtgagattctgtctcaaaaacaaaaacaaacaaacaaacaaaaattagccaggtctggcagtatgtgcttgtggtcccagatacttgggaggctgaggcaagagaatcacttgaacctgggaggtgaaggttgcagtgagctaagattgcaccactgcactccagcctgggtgacggaacaagattctgtctcaaaaataaataaataaataaataaataataaaacagcattctgttctgtggttcacttcaattcctcctaaaagaaccagctgcatgcctgctcaggctcagctcactggacgcttgtgttgtggagggtgacctaaagcagaatctctgaaaaagagcatcaacaaagacttaccacgggacaaataaatggctgccattctctgaagctgatggtgtgatgatgtgcatcccttccttgatgccaagatcacctcaggccagcttatgaatctaggtggatagaggcaatctccattcctctttgtacagggttatttgcggtcctgttcatatcaatcatcaaacaacaagcatgaaacatcagtcatcaaacattatgcctgagctttgtctctgcaggtgacagatgtgaaggccaccaaaaattgcccactcagtaccgtcactcagtaacaaaagtattaataacagtaactgacatttactgaggactgatatgtcagaagtagctctagtagctttatatatacatgctcagttaattatcatagccatccttcccagtagctatcattacctctatctatctatatctatctatatttatctatctatatctatctatctatatatctatctatatctatctatctatatctatcctatctatctatctatctatctatcgagacagggtctcactctgttgcccaggttgaaatccaatggcactaacacaactctctgtagcctagacttcccgggctcaagtgatcctcccacttcagcctcctgaatagctgggaccataggtgcgtatcatcactcattattattattattattttgagacagagtctcactctgttgcccaggctggaatgcagtggcatgatctcaactcattgcaacctctgcctcccaggtgcaagcgattatcaggcctcagcctcccgagtagctgggatttcaggtatgcactaccatgcctggctaatttttgcatttttagtagagacgcagtttcgccatattggccaggctggtcttgaactcctggccttaagtgattctcccacttcagccccccaactagctgggactacaggtgcacaccactgggtccggctaattttttgtagttttagtagagacaagttttcaccagattgcctaggctagtctcaaactcctgggctcaaacaatcctcctgacttggcctcccaaagtgctgggataataagcataagccacgatgcctggcccattacttctatttaatactgaaaaaaacctacactcaaacaaccctagtagtcggtctgatacttgtccctagagcctgatctcctgtatatggtgttacccccccgccatatgaccagaagacagtgcagacctgcacagaacaattcagtagtcaccagccacgtgtgttattgataacttcattacgtacctaagatgacttaagaacaaaatctaaaattttcaaaagtcggccgggtgcagtggctcacacctataatcccagcactttgggggaccgaggcagacagatcacctaaggtcaggagttcaagaccagcctggccaacatggcaaaaccatctctactaaagatagaaaaagtagccgggcgtggtggcacttgcctgtaatcccaggtactcggaaggctgaggcaggagaactgcttgaccctggaggcagaggttgcagaggttgcagtgagccgagagagcgcgcagcctctccgaactggacgcacagggaggactgatagtccctggagaagcgagtgaagtgaagcggatctgagaggctcctaggcgacagcgcgcaatcattcctttgccgccccctgctatccccgggaccgccaaggaggtggaactcaccacagcctgggcagactccaccaccataaaggcgaaaccgcactgacggagaggagccagcgccggaaaagatggcggtggtgcgctgacgtcacttccgcttcaacactctggccgggcgaggctcgtgggctccagtttcagccacgtaggaccgggtagaacacagaaattctagtttcctctcgggtgggtgcagaaagggcctggggttggctcagggagggggatgcagaactaggtccagagaaaaaggtgaggttagaaccgggcctccagacggaactgtgggcgaggggaggggctcgtactcggggggtgatttagaggagggacccggcctagccggtggttcaggtggccggtcgggctggaagggcggggatgagggatgggacgcatccccgggggatgctcctccaaagcttttatcgggcgagcgcagtggctcacgcctgtaattcctgcactttgggaggctaaggtaggtaaatagcttgagtctgctgggaatgggtgctcgcttggtgtcacaaaatcaacactgagacaaaggatctcagcaaggctagttttactttctgcagaatgggtgccactggctggcagtcttgccaccagagcacacattaacaaaggagacagggtttttttaaacttgaagtgtccatccttctgctgtgtccagcttccattggctggaacgggacctcaccttcctgtacttcactggattggctagcaacttagaacttcccaaaagaggcaatggcagaggagaacaaaggaagagaggaagtaacttgtggactgttgagagaggcaaaaacacttctaaatagggaaaggaataggccatgacctaatagttgcttggaccagttcaggcatgccagggcaaatatctaggctaaaatgtgggagctaaaaacagagtctattgatttctttattacggctggcagaatttaacaatattaccacaggtctttgagaaaatttggcttctaagagggattactatttatttcaatcagactgggaggaaagtccctttgaagaggaacctgtatttatttcattttctacaagtccaagagtttgagaccagcctgggcaaagtagcaagaccctgtctctctctctctctctctctctatatatatatatataaacatatatgtataaatacatataaatatataaatatataaaaaatatataaatatacatgttcaaaatgcttgttccctggtgccataaagaaattagcacttgaacataaatttaatttactcagcaaggccatttttacttcctgcagaaacggtatactcaccagcagttttgccacgagagtacaccaaacaaaggagatagggtcatttataacctgatgcttccaacctactgctgtgtccagtttccactggctggaatgggacctcacgttctggctagcaacttataactttttaaaagaggcaagggtagaggagaacaaaggaaggaggaagtaacttgtggaatgctgagaagggtcaaaacatcttcaaataaggaaaaagaacaggctatgccctaatgcttgcctggaccagtacaagcatgccagggcaaatatgtagactaaactgtgggagctaagaatataaagtacattgatttctttatcacggctcacagatacttgagaatgttagcacaggtctttgaataaattttgcttctaagagaagttactatttattcctaattaaatgtgaaggaacgtctttgaagaggaacctctgctttactttttagatataaatataaagcttgtttgtatgcctctcctcatgttcctagagcctttccatgattcttccatattgataaagctgccaatgaatggcatggtctatcccttccattcagtcagagtttctgtaggcctttttttcttcattctttattttttagaacctgctgattccattgggttttctttttctttcttgcttgcttgcttgcttgcgacagatctcactggatcagaccaggctggagtgcagtggtgtgatctcagctcaccgcaacctccacctcccaggttcaagcaattctcctgcctcagcctctggagtagctgggattacaggcgcctgccaccacgcccagctaatttttgtatttttagtagagaacgatttcaccaggttggccaggctgatctcgaactcctggcctaaaatatctgccaggccaagatggtaggatcgtttaaggccaggagtttaagacaagcctgggctacacagcaaaaccccatctctctatatatatataaaaaaaatttaaattaaaaaatgttttgttttgttttgtttttttgagacatagtttcgctctgccacccagactggagtgcagtggtgcgatcttcactcactgcaaactctgcctcctgggttcaagccattcttctgcctcagcctcctgagtagttgggactacaggcatgtgccactgcgcccaactaatttttgcatttttaatacagacatggtttcatcatattgacccagctggtctcaaagtcctgacctcgtgatccatccacctggtcctcccaaagagctgggattacaggcatgagccactgccccagccaaaaatatgtatttctgttgttatttttctgatcttaccacatgggccaggaacacatttcctacgttgtaaaatagcactgataccagacattctccccaagattattcagaaatgtaacatactcccaataaaaataccaaaagtttttttctggagttaagtacattgatactgaagtttatgtggaggaacaaacatctgataataaccaagaaaacaaaaacaaaagcaatgatgagcagcagatattaaaacatactattgacagttttcatgcaaggcaaagaattacattattttaaaataaaaataaagtccgggcacagtggctcacgcctgtaatcccagcaatttgggaggccgaggcaggcaaattacctgaagtcgggggtttgataccagcctggctaacatggtgaaaccctgtctctactagaagtacaaaaattagcaagcgtggtggcacatgcttgtaatcccagctacttgggaggctgaggcaggagagttgcttgagcctgggagatgaaggttgcagtgagccgagattgtgccactgaattgcagcctggctgacagagtgagactctgtctaaaaaattaattaattaattaatttaaaaaacatactataaagcctctataattaaaactatgtggtactagcacgtgaaacagaaactaataaaatatcaaaaaatagacccatgaacatgtagaaatttggttcataaatgtattttgccagatgcggtggctcatgcctgtatcctagcaatttgggagactgaggcaggaggatcacttgaggtcaggagttcaaaaccagcctgcccaacatggtgaaaccccatctctattaaaaatacaaaaacatagccgggttcggtggctcatgcctgtaatcccagaactttgggaagccgaggcagccggatcatgaggtcaggagttcgagactagtctgaccaacatggtgaaatcccatctctactaaaaatacaaaaattagctgggtgtggtgatgcatgcctgtaatctcagctactcaggaggctgaggcaggagaattgcttgaacccagaaggcggaggttgcagtaagctgagatcgcaccactgcactccagcctgggcaacagagtgagactctgtctcaaaaaagaaaaaaaatttagccaagcatggccgagcatgctggctcatgcctgtaatcccagcactttgggaggctgaggcaggcagatcacgacgtcacgagatcgagaccatcctggccaacttggtgaaaccccgtctctactaaaaatagaaaaattagctggcatggtggcgggtgcctgtaatcccagctactcaggaggccgaagtaggagaatcgcttgaacccaggaggcggaggttgcagtgagccaagatcgctcccctgcactccagcctggcgatagagcgagactccgtctaaaaaaaaaaaaaaaaaaattagccaagcgttgtggtgggcgcctgtaagcccagctactcgggtggctgaggcaagagaattgctcaaacctgggaggcagaggttgcagtgagccgagatcacgccatttcactccagcctggcgacacagcgagactctgtctcaaaaaaaaaaaaaaaaaaaaaaaaaaaagccgggtgcattggctgatgcctataattccagcacttttggaggcagaggcgggtggatcacctgaggtcacgagttagagaccatcctgaccaacatgaagaaaccccgtctctgctaaaaatacaaaattagctgggcatggtggcacatgcttataatcccaggtactcaggaagctgaggcaggagaaccgcttgaacccaggaggcggaggttggggtgagtggagatcgtgccattgcattccagccagggcaacaagagagaaacaccgtctaaaaaaaaaaagtggcatttcagataaatggggcaaaaaatgccatttgtaacaaatggaaggtctaagatagctggttagccatctgagaaaagatgaaattaaatccatacttcacagcatatacaagaataaactccaagtggactagggatctaagtgtaaaaaataaaaccacacacgtatttagggtgtttaagtgatttcttggctgagtaaggaaaaagatgttaccacaaggcggcagtagcacacaagcttcatttgggatgtgctttgacaggttagcagtgggggaggtagcaaacagcaagagaatatccacaggcttctacctgtgggtcgctgctcagaaagggtggaaaggaagaaagactctcagaggagaaggggaatcaaagagggggcttataaataactaaatgatgatattcaccagactggcagcatatcttccagttaaaaagctctgaaggataagtctggccaatatggtgaaactccgtctctactaaaaatacaaaaattagcaggtatggtgccaggtgcctataatcccagctacttgggaggctgaggcaggagaatcgcttgaacccaggagatggaggctgcagtgagctgagattgtgcccctgtactccagcctgggtggcagagcaagaccctgcatcagaaaaaaaaaaaaaaaaaagctctgaaggaccgcaggggtatggggttttcatagccctggagttatcttatctatggctgtcagatattggatataatttcagagaatacaaagcaggcgcactcgaaatggctaaaaataggcttgttcaggctatgtttcaaacaatccagtgtgttaaaattgcagtttggcaggggtaggctattgtgaatactagtgagacaaacattggtgtacaaatatctctgagtccctgctctgaacagttttggatatgccaaagtggaatatctggatcacatggtaattctgtttaatcgttctttttttttcttttttttgagacagggtctcactctattgtctaggctcgaatgcagtgacgtgatcatggatcactgcagtcctcaacttactgggctcaggtaatcctcccacctcaacctcccaggtagcagagattacaggtgcatgccaccaccatccttggctgaattaaaaaaaatttttttgtaaagaccatatttcaccatatgcccaggctggtcctgaagtcctaatctcaaggaatcccctggcctcagcctcccgaagtgctgggattacaggtgtgagccatcacatccagcatggttttgattttcattttcatgatgtttagtgatgttgagcatcgtttcatgagcatcttttcgtgtgtttattggccatctgtatatcttctttggtgatattattcaagtcctttttctgtattgaaatgagttttgttgttgttactcttgggttctagaaattttaaaaataaactctggatatttgtccccagtcagatacaggacttgcaaatattttctcccatttgtagattgtctttttactctcttgttattatgctttgatgcacaaaatttgtatcattgattaggttcaactcataatttttcttgtgttgcctgtgtggttgatgtcataactgagaagtcatttccagttgaagctttctcacctatgttttcttctaatagttttccagctctagctcttacactacactaaggtttttgatccatttttaaaaaatcatgccacattattattattattattattaagatggagtcttgctctgtcacccaggctggagtgcagtggcacaatctcagctcactgcaaactctgcctcccaggttcaagtgattctcctgcctcagcctcctgggtagctgggattacaggcgcctgccaccatggccagctaatttttgtatttttagtagagatggggtttcaccatattggctatgctggtctcgaactcctgaccttgtgatccacctgccttggcctcccaaagtgctgggattacaggtatgagccaccacgcccatccttcatccattttaagtaaatttttatatatggtataaggttagggtccaactccattcttatgtatgtctatatctcagttcctcccccatataatcctgtccccagggaatcaacaacccatgctcttcctagtcacctccttgaacatgtccctcccccaggaaacctccaacatgagatagaacaatgtagaaaggacattcaaaacttccctttcccttgtttgtcaaaggaatccgccccaacggttgtccccttaagggaagtcccactggggggagggggcattggttgcattaatgccctcttaaccagctcagaagtcagaaacttcaaaagggaactcaaaccattgttagatgacccttattgggtagcagatcaaattgatcaatttttagggccacagttgtatacttgggctgaactaatgtccattttagatattcttttctcaggggaggaaaggactgtgatccacagggccactgtgatagtcagggaacgtgaacatcctcctggccaaaacgttctgcagcggaccaaaaatttctgttccaagaccctcaatgggacaatcacaatgcagctcaccaagaaaatatgagggatctcggggaaatgataattaaaggaattcgggaaccagtaccctgaactcaaaatatttcccgagcattcaacatacaacaaagaaaggaagaagagctcatggaatttttaaacagactctaagagcaagttagaaaatacgcaggcttagaaataagaagatccacttcggcaaggattgttaaaactccactttgtcaccaacatttggccagaaattacaaaaaaattgtcaaaaaaatagagaattggaaagatagctccatagaagaacttctaaaggaggcccaaaaggtatatatgagaaaagacaaggaaagcagaaacaaaaagcaaaaattccactgcccacccttcaacaagggacacaaggaaataggtcccataaatgttctaagccactagctgcaaagtcacatacaggaaagaaaagggataaaacctggggacctaacggcaagaagggaaaagggggaaaataaatgtttcagatgtgggaaactgggacactttaagacagaatgtcccgaatgagaaagagagagaaatcctcccactcatgacttttgaagaagaatagggggttcagaggctctgtctcttttatctcaaatcccaccaatagcccttgataaatctacaggtgggacccaagctagaaattttcactttcctaatagattcaggagtagctcgctcctctgtttgctacctttcatcaaatgtagcctgctctgcagaggagctgttcgtcacggtggtaaagggggaaaggtttagaacaaaaattttggaggaaacagaagttaaattcaagaatagatcagccgccattaaattcatgttaatccctgatgcagggacaaattcgttaggaagggacttaatgtttaaattggggataggtctatatgttaatcagggaaaattatttacttccttaaacttgcttaccgcccctaaagaaagccaaatccaccctgatgtgtggttaaaggagggaaatcaaggaagattcaagttccgccaattcatataaaacgaaaacctcctggggaaatagtaaaaagaaaacaacaccccattcccctagaaggcagaatgggtttaaaacctataatcaaaggtctcatccatgacagactccttgaaccctgtatgcctccttataacactctaatgttgcctgtaaaaaagtcacatggatcacggctagtgcaagatatctgggctattaaccaaatagtccagactactcaccctgtggtccccaacccttataccattatcagcaaaatcccatatgaccaccaatggttcatggtaatagacctaaaagatgccttttgggcttgccccttagcagaggacagccaggacatgtttgctttcaaatgggaggaccctcactccagttggaagcaacagtactgatggacagtcctgccccaagagtttgtggactccccaaatctatttggtcaaattctagaacaagtcctagagaattttcccctcccctcatccatatatccgctccaatatgtggatgacctgctaatttcaggaggcaccaagggctgggtaacagcagtatcaattaactttctaaattttctgagggaacgcggattgctggtctcaaggagtaaactcgtttgtggaacctgagataaaatacctaggatacttaataagcaaaggcaaacagagattaggccccaaacgaactgaaggaatcatagccgtacctttgcctgaaacaaaataagggcttaggaaattctgggggttgactggatattgtcgcttatggattgactttatgctttaaaaacaaagcctctatgcctgaaacttactcaagagagacctgatcctcttctttggacaccacgggaggtccaacaagtagaggaattaaaacacctgctcataactgccttagttctaccttccctagaacagccattccacctcttcgtcaatgtgaataaagggatagctctaggggtgctcacccaaacacacgggggccaccggcagcctatagcctttctgtcaaaaattcttgacccactaacccacaggtggcccgagtgtatttaatctgttgcagcaactgccctatttacagaggaaagcaggaagataacctttgggggaaacctcactgtaaacacaacccatcaggttagaaccatcctaaaccaaaaagcaggcagatggcttaccgattcaagaatcttaaaatatgaagctatcttactagaaaaagatgatttaaccctaaccacagaaaaaacactcaaccctgccgctttcctaatgggaaatccaatccccaggaccctgaacataaatgtctggatctaatctgttatcaaactaaagtcaggcttgatctaagcgagaccccattcaaaacggggcaacacctgtttatagatggctcctcccaggtatttgaagagaaaagacacaatgggtactcggtagtcaatggggaagccctcacagaggtaaagtcaggaagactgcccaataactggtccacccaaacatgtgaattgttcacattaaatcaagccataactgggaaagggactatttacactgactccaaatatgccttcggggtagtccatacttttggaaagatctggactgaataaaaggccaggaccttgtccacaaggagttaatcactcaggtattggaaaatctccagctaccagaagagatagccatcctgcgtgtcccaggacaccagagaaatatttctttcaaaagccaaggaaataaacttgcagaccaaatagccaaacaagctgcctcttctcccaaaatgcccatttttcacctaaccccttgtctttcttccccaactgcaattcacatcttctctcccactgaaaaagagaaattaaggaaaataggagctaaagaaaactcagaagggaaatggatgttaccagaccaaagagaaatgctatcaaaacccctaatgagggaagtcctatctcaactgcatcaagggactcattggggacctcaagctgtgtgcgatgcagttctcagagtttatgggtgtataggagtttataccctagcaaaataagttacagatagttgcctaatatgtaagaaaactaatttaaaaaaaccctaaggaaaccaccttttgggggaaaaagcccaggattgagaccattccaaagtgtccaaattgactacaccaaaatgcccccaataggccacctaaagtacttgctagtaatagtggaccaccttactcactgggtggaggctattcccttttcaagtgcaactgctaataatgtgattaaggcattagtagaaaatattatacccaggtttggactgatagaaaacattgattcagacaatgggacccacttcactgcacatgtcattaagggactagcctaagtactaggaataaaatgggaatatcatactccttgcacccaccctcataaggaaaagtagaaaggatgaaccagactctaaaaagccacctaaccaaatcaattttagaaactcagttactatggactaagtgccttctcactgccttattaagtgtctgaactgcccctcagagagatgttggcctatctccctatgaaatcctatatgggttgccttatctacactctactactgacattcactgaaacaaagtttgtttcatttgaaacaaaggatcagttcctcaaaaattatatactcgatctgtcttccactttctcttccctcaggatgaaaggcttcctagcacaaacaccacccctggagttcccggtacatcaataccagcctggggatcacgttctcatcaagagttggaagagggaaagcttgaaccagcttaggaggacctcatctggtactcttgatgaatgaaacagcaatctgaatggctgaaaaaggatggacccagcactccaggtaaaaaggaccccacccttacagagtcatgggctgtcactccaagaccaatgccttccaagttagtattcaaaagggtctaatctgtctttcccttcttcccttaactactcaaggacacttcattatcaatgtaaccagatcactctctcctcaaacaatcacgtttgacgcatgtcttgccatacactttggggacctccaaaaccagaagcagctatcctccttgtagaaatatctctgtccttccagggtagattctaacctcttacattcacgcaactcttgcttggtagaagccgaaacccttacgttttgggaaaggttctgctccacctggaacaatgtcctatggactactaagcatcaagggtggacctccccaggaagctgcgcctctttaaaaccatatcttcgtttcaccaaaggaaatgccccctctaattgccaacatcatcaatgcaacccagtgcaaatttctatcttacccctacctccatcgatcttgagcccactttaggtcttttctatggcataggaaccgaagtgggctgagacagatcccatagggtcctttgaaatgcgctttagcaacccttccccacctcctaggggtaacccctctccaaaccctcctccaaatcaaacaactattttgccactacctaatgacaaaactaaagtggtcatagtggaagtcaaagacttaaaccctagccattgaaaccgggtatcaggatgcaaatgcctagctggaatggattaaatattccgttcatactctaaacaaaagtgactgttacgcttgtgcaacaggtaggccagaaacaaaaatagttccttttctgcttggatggtctaaccaaccgggtatggactgcatggtagctctttccagcatcccacagcctggggtaataagtcatgcggcactctcttactgcttttcccagaagtgaaagaccgccctgtgtgtcagcccccaagggccatccagctcccagcgtctgatgccaatttttcctcatgtctctcacaacagggagaaaacttggcattctttgggaatctaacaggatgcagtgaacccaagccttttgaagagctcaccaatcagactgcccttgtctatccatgagcagatgtttgatagtattgcggaggccctctagtgggtatgctgccaagcaactggagtggcacttgggctctaatccagttgtctatccctttcaccctggcatttcatcagccaaacaaaaaccaactaactcagaaaaaaaggaaagcccctcaagggtcctttgaccccgatatctacatagatgctatcggggtcccctgaggggtaccaaacgaattcaaagctcgaaatcaaatagctgctggattcaagtctgtccttttcttgtggtctactataaataaaaatgtagactggataaattacatatactataaccaacaacgatttgtcagttacaccagggatgccattaaaggaatagctgaacaattgggtttcaccagccaaatggcctgggaaaatagaatagctcttgacatgatattagtggaagtccaatgttgtacctgtatccccaataatacagcccctgatgtaactatcactaagggtctataaggcctcaccactctaggaaatgaactagctgaaaattcgggaatgaatgatccctttacaggtgtaatggaaaaaatggtttggtagatggaaaggactaatggcctctattctcacctcccttgtgatcataataggggtgctcattctcttagggtgctgtattataccctgtgtctgcggactagttcaaaagctcatagaaacagcccttaccaagacctcccacaactctcccccaccctattcagataaacgtttatttctaagcaaccaagaagagcagtgaagccagatcctgttagaaatatatgaagaggaaggactacaaaatcaaaaggggaaaattattagacaaaatgagttgctctacaaaggtccaacttcgttgtcctttgttctgtaacctttgttctgtaaactgcccttcccgcagaaactgtctttcccgccgaccaaaactgcccttcactatcactgtaatccatacccctactctatttgaaactgccaatcgggatcagcttacattgtgtggttcaaccaccagccaatgaggaaaaaacacagaagcaaaagctatgatgcattagggttaaaaaccccttcctttccctgtccaatgtgctcttgagactgctacaggcgcaagcagccaccttctgcagaagtaaaccttgccttgctgagaaatttttcttttgagtgctggtctctctctgtggcaccaagaacttatttctaacatggagtgatttccaagatagatggttaagtgaaaataaaaactgttgccaggcacggtagctcatgcctgtaatcccagcactttgggagtctgaggaggttggattatttgaggtcaggagtttgagaccagcctagccaacatggtgaaatcctgtctcttctaaatatacaaaaaattagccgggcgtggttgtgggtgcctgtaatcccagctacttgggaagctgaggcagaagaattgcttaaacccaggaagcagaggttgcagtgagccgagatcacagcactgcactccagcctgggtgatagagtgagactcggtctcaaaaacaataataataataataataatacaaataaaaaaatgaaaataaaggccaggtgctgtggctcacccctctaatcccagcactttgggaggctgaggcaggtggatcacaaggtcaggagttcaaaaccagcctggccaagatggtgaaaccccgtctctactaaaaatacaaaaattagctgggcacagtggcaggcgcctgtaatcccagctacttgggaggctgaggcaggataattgcttaaacctgggtggcagaggttgcagtgagccaagatcatgccactgcactccagcctgggccacagagtgagactccatctcaaaaaaaaaaaaaaaaaaagaaaagaaaaagaaaatacataattatctgtttattctgagtatagggaaacactgataggattattctgaaaataataagattcagaatctattggggatggatgggaacagctagaacagaatggtggggtaagaacaagatggaggctgggcgtggtggctcatgcctgtaatcccagcactttgagaggctaaggcgggcggatcatgaaatcaagagatcaagaccatcctggccaacatggtgaaaccctgtctctactaaaaattcaaacattagccaggtgcggtggtgcatgcctgtagtcccagctactcaggaggctgaggcaggagaatcacttgaacccagaaggtgaaggttgcagtgagctgagattgtgccattgcactccagcctgggcaacagagcaagactctgtcccaaaacaaaaacaaaaacaagatgtagaggatagggaaagggaaacctctctgagctctctgagcataacattctgttagttcttattacgcatgtccaagtaaagagaccaccaagcagtctttgagtgagcaacaatggctgtgtattacatccgggtgtggacgggctgagtctgacaaaacagtcagcaaaaggtggtgggattatcattagttcttataggtttgggataggtagtggaattaggagcaattttttttgcaggcaggaggtggatgttacaaagtacattctcaagggcggggaggatgttacaaagtacattgacaagggtggggagggtgtattgtcacaagggtggggtacattcacaagggcagggaggatgtatcctacaaagtacattcagaagggtgggggaatatcacaaagtacattatcacaagggcagggggatgtcacgatggcttgatcatgatgcggccagctcagaggaccttacattcctgcctttttatgttaataatgcaggtggactgcaggtggggtactatagatgactaagtagggtctggtccattgaggttgtagagtttgaggggtcaaattcttaacaagaactgattgtccagctagggcgtcttcatatggctgggaatctggagtaggcaagagaagattagcagcctggcgaatttcctgtctagcctgctggaggactggaagatagtcacctagagggctggtgtctggcaagaggttggggcctaacaagaaggtatgtccatataaaacttcaaatggactataccctgtagcttcttgaggataggctctaattctaaagagggcaaatggtaacagtactgtccagtcttttttaagttggagactgagcttggtgaggtgtgtttttaacagactattagttctttctacctttcccaaagattgaggatggtaaggggaatggaggttccactggatgccgagggcctgggagatggcttgtgtgatctgactaatgaaggccagtctgttattggactctatagaggtgggaaggccaaaccgaggaattatgtctgacagaagggaagaaatgaccatggtggccttctcagaccctgtgggaaaggcctctatgcatccagtgaatgtatctacccagacaaaaaggtatgttagttttttgactcagggcatatgagtaaagtcaatctgccagtcttgggtgggggcaaatcattgagcttgatgtgtaggaaagggagggggcctaagatatccctgaggggtggtagagtaacagatggaacaccgagaagtaatttccctgagaatggatttccatgatggaaaagaaatgggaggttctaagagatgggccattggcttgtaaccaacatgaaagaggttatgaaaggacgataagatagaatgagactgtgaggcaggaaggaggaattttccttgatccaagaaccatttgccttgagtaggaagggattgataggtcatagttttagtgggagtataggtggaagtgatagatgagaaggaaaaaaaatggccatgagggacagatgtgggaatactagctgcttcttttgctgcattatcagcataagctttgccttgagcagtgggatctggtgacctctgaggccccttgcagtgaatgactctggcttccttgggcagtagagcagccttaaggaggatttttattaaggaagcattgatgatggaggacccttgtgtcatgagaaaaccttttcctgcccatataatagcatggtgatgtaggatgtggaaggcatacttggaatcagtgtagatattgacacatagtccctttacaagggtgagagccccagttaaagcaatgagtttggcttgttgagaggtaatggaagggtgcagggcagtagcttcagtgaccgatgtggaagacaatacagcatagcctgcccttgttggtgaccgacgatttggccttgaactaccatcaataaaccaagtgtggtctggattagcaacaagaaagagggaaatatggggaaatgtggaggatgccatatggattagagagatacagtcatgaggttcaggtttggtgctaggtataaggtgagaggccgagttgaagtctgtgccaggaacaatggtaattgtgggagtttcaatgaatagtgagtacagttggaggagtgtgggggcagaaagtatatgcaccaagtgtgaggaggaaaatagattttgaaaattatgagaactgtagagtaagtggggcatggtttgtgatcttgagggcctctgaaagtattgaagtggtggctgccagcacacatagacatgaggaccagcctagaactgtgaagttaagttgcttggataggaaggctacaggctgtgggtctggttcctctgtaagaactccaaccacacagccttgtatttcagccgtacataaggagaagtattgggatgagttagggagtgctaatgtgggaactatttctagggctgtctttaaggaatgaaaagaagggtgggaaaaacttaggttctatggggttggtcaggtttccctttatgagtttatgtaggggtttagttaggatggcaaaacctggtatccaaaggcaaaagtatccaaccatgcctaggaaggaaaggagttgttgctttgtagaaggggttggggtttcagagattagctggacccagttagcagggagaacacgtgtgttttgatgacagactatgccaagataggtaatggatggagaagaaatttgggctttagagggggatacatgattcccctttgagaatagatgttgaaggagcaggagggtatcctgttgggaagattcataagaggggatgcagaggagaaggtcgtccacatattgaataaggtgagaaacagatggacagaaagaaagtaaatcatgagaaagagcttgactaaagtaatgggggttgtctctgaagccttgtggcagtacagtccaggtaagttgctgagattggtgggtgacaggatcagtccatgtgaaagcaaaaagaggtcgggatgaggggtgcaaaggaatagtgaagaaagcatctttgaggttgaggacagaataatgagttgttgagggaggtattgaggataggagagtatatgggtttggcaccacggatggataggttagacaatttggttaataaagcaaagatcctgaaccaacctgtaagatttgtctggtttctggacaggtaggataggggagttgtaagaatttgtaggctttaaaaggccatgctgtaacaggagagtgatagcaggctttagtccttttaaagcctgttgtgggatggagtactggtgttgagtggggtaagggtgattaggttttaatgggatggtaaggggtgcctgatcagtcaccaaggagggcatagtggtatcccatacctgtggattaaggtagggagacatgagacgaggatgcaaaagaggcttggaatcaggcataaggacagcaatgaggtgtggctatagtccaggaatagtcaaggaagcagataatttagttaaaatgtctcagcctgataagggaactgggcaggtagggataactaaaaaagagtgcataaaagaatattgtccaagttggcaccagagttggggagttttaaggggtctagaagcctagccatcaatacccacaacagttacaggggcaagggaaacaggcccctgagaagaaggtaaagtggagcgggtatcccccatatcaattaaacaggggatggacttaacctccactgtaagagttacccaaagcttggtgtccatcatggtccagggggcttctgagatgattgggcagcatcagtcttcagccgctaagccaaggagatctgggaaggagtcagctaaggaacgttggatttgagctccaggagctttaggagtggtggtcatgtgagtcagagagtctgacttccagtgggggccctcacagacagggcacggcttacaaagaatcccaagatatggtggcacttggcagctttttcttggttactgaacaccttgaaggcgaggttgattaaatcctgttgtggggcttgagggctggaatccaatttttggagttctttttctaatgttaggagtggattgggtgataaaatgcatattaatgataagggggccttctgtcccccatgggtctagggctgtaaagcatctaaaggtaactgctaattgggccataaactgggctgggttttcgtctttacattgggtagttttctttagcttgtcataattaacagcactgtatgctgcctttttgagcccctcaactatgcaggagaccatgtaatcttgcctagctatacctggggattccgtctggtattgccaatggggatcctctcagggaattgccctggtgccctcttggaggtctggctcatgaagccagtgggtgtctttgtaggactgggctagaaaataaactctttctcgttcgtctgggaagggggtaaaggtcaggatgacatttaagtcactccaggttaagttgtaggactgagttagatattggaattcctgtatatatttagtggggtcctatgagaaagagtctaaatgctggctcatttgggaaaggtctgatagagaaaaaggcacatgtaccctcactatgccttcagctccagccacctaagaggaaatttttgggcatgtgggggagagctagtcacagaacaaaactataagccagacagggtgtgaggaggggaggtaatagaagcgttatagggtggggtagcagaggctgcagaagaattgggacccaattcagcctggcgaggagcagctgggggaggaggagagaggtcagaggggtcagtggaaaaggaggattcagaggactctgagcttggggtggagaacaaagaagcagacgggagagaaagaaggaaaatctgggacaagtctcattgggagcagaaactagggagggagtaaagtgtaaaaaatgcctggacatcaggcatctcagaccatttgcccaattttcaacaaaaattatctaggtcttgtaggatagacaaatcaaaagtgcctttctctggccacttggaaaaactgtcaagtttgtattggggccaagtggtattacagaagaaaacaagacgttcaggttttaggtcaggtgttagtcaaaggggtgttaggtttctaagaacacaggctaagggggaagagagaggaatggaatgcagaaggttgcccttagtggagaaggtaagtttaaagaggaaggtagacacatggagaaatggaggtgggcagctaccagtcttccagtaggcatccctgactgagtcctgggctttaatgtgggtgagcagccaaagcaggcatccctgcaattgacctgccatcaagggaatgtgggtgaatgatcaaggaaggcatctccgcagtgatcaaacgccaagggaagactgtcttcccaagtccatgaccaacatcggagtctttggatgcacggataaaatgtgtctgctttttgtctctactaggaagggagagaaactgaaactgaaagaagagagattgaagggaggtgagagaggttaggtagagagcaaaaaaaccgcttatccaagtgcaaaaaaaccgcttaccgatttgaaattagtgagacgatccttgggctggctggtctgatgacccgaggtcataggtggatctcctcatggagggagtgtaatgacaggggatgggtctcctgaggagttctaatgtcccaggtttcagcacaaaatgttacatgcgtctgagtaaagagagcacctagcaggctttgtgcgagcaacaatggctgtgtattacatccggatgtggatgggctgtccaacaaaacagtcagcaaagggtggtgggattatcattagttctcataggtttgggataagcggtggagttaggagcaattttttttgtaggcagtggggtggacgttacaaagtacattctcaagggcggggaggatgttacaaagtacattcacaagggcggggagggtgtatcatcacaagggtggggaggaaggttacaaagtacatttacaaggagaggaaaggtgtactgtcacaagggccaatggcagggtacattcactaggtgggggaggatgtatcttataaagtacattcacaagggcaggggaatatcacaaagtacattatcacaagggcggggggatgtcacaatggcttgaccatggtatggccagctcagagtaccttacagttctgatgtttaaaattacattcttttttttctttaaaaaaaaaaaaaaaaacagggtttcactctgtcacacaggctgaagtatagtggcattatcatggctcactgcagcctttacttcctgggctcaagcagtcctttgcctgagtaccagggactacatacgtgcaccaccacatccagctaatttttaaaaatatattttgtagagaagagatctctctatgttgcctaggctgccctcaaactcctgagctcaagcgatcatccttccttggcctcccacattgttggcattacaactgtgagccactctgcttggccctttattcttttacatatttaattttttaaaaaatcaacaaagatagagggaaaacccaaaatggaatacgaacaggaacaatcaatctgaactttgtatcaaatgggtaataagactatgtaacaggaacaacacaacaacagttgctgcctagacattagaaatagaggccaggcacagtggctcaaccctgtcatcctagcattttgggaggctgatgcagaaggataacttgaacaggatttcaagaccagcctgggcaatatagtgagacacagtctcgaccaaaaaaaaaaaaatttaaaaataaaaaaattagccgggcctggtggtacatgcctgcattcccagctactcagaaggctgaggtgagaggattgcttgagcccaggaggtcgaggctgcagtgagctatgattgcaccactgcactccagcctaggtgacatggcaagacactgtctctggaaaaaaaaaaaaaaaaaaagaacaccaccggccactgtggctcattcctgtaatcccagcactttgggaggttgaatcaggctgaatcaggggggtctcaggagttcaagaccatcctggccaacatggcaaaaccccgcctctactgaaaatacaaaaattagctgggtgtggtggtgcacacctgtaatcccaggtacttgggaggctgaggcaggagaatcacttgaacccaggaattggaggttgcagtgagctgagatcacgccactgcactccagcctgggtgacagagcgagactctgtcattcataaataaataagtttagaaaaaaaaaatgtgtctgaaagggtcttgagcatccctctgggcaaattccaggcatcatccataatgatgaatgcacaaatacaaagatacgaatgagccagagccaaccttatattcctgcagtaaatgccactgggtttactattttcttatcaagcagttggaatttatttgctaatccgttccttcctagcttccttttttccttcttttttttttttttttaaatggagtcttgctctgttgcccaggctggaatgcagtggcatgatcttggctcactgcattttttaatttttaagttttttgtagatggggggcttgctatgctgtccaggcaggtctcgaactcctgagctcaagtaatccttttgcctcctttcaaagtgttgagactccaggcataagccactttgcccagttgctactattatacttagcgcatttttttgtttgtttgttttttgagacagtcttactctgtatcccaggctggagtgcagtggtgtgatctcggttcactgtaacctcctgcctcagcctcccgagtagctaggaatacatgcacatgccaccacgcccagctatatttttttagttttagtagatacaaggtttcaccgttttagccaggatcatctcaatctgaccttgtgatccacctgcctcagcctcccaaagtgctgggattacaggcatgtgagccaccgtacctggcttacttagtgaatttgtaccaatattcattaccaatataattctgtagtttttaatgactgtactgtttttatcagtgataaaaacgatacatatatacatcttgtactgcatcataaaaagatttagcaagatttgcttcattgttaatactctgaaaggatttatggagaattaggaccaattggaccttgaaaatgtcatgtaaagatgtctggctgggcatggtggctcatgcttgtaatcccagcactttgggaggcccagaagagaggattactctagctcaggagtttgaggacagcctgggcaatggagtgagataccttctctaccaaaataaaaaagtgtgagtttaggtgctgtgttccttgttgttgttacagtgtgagccaccgtgcctggccgagactgggtaagttatgaagaaaaagaggtttaatggactcacagttccacatggctggggaggcctcaaaatcatgacagaaggtgaaggaggagcaaaggcacatcttatatggcagaaggcaagagagcctgtccaggggaacagctgcttataaaactgacagacctcatgagatttactcactgtgacaaaaacagcacacgcctattatcccagctacttggctgactgaggcatgagaattacttgaacagcatggggaaacccccccccatgattctattacctcccacctggtctctccctcgacaccatggggattatgggagctacaattcaagatgacatttgggtggggacacagccaaaccatatcagctggcaacttgcttgcagctcataacatcaactgtttctttgggccttcagtcctgctgacttccggcctcctgagtccctaagcagaggaatacgaattcaaatcttgattttctcattgcagctcatagtgggagatgcccagtctctctgtgaacattgacagaattttttttttttttttgagacagagtctcacactgtcaccaggctggagtgccgtggcgcaatatcagctcactgtaacctccacctcccaggttgaagtgattctcccatctcagcccccaagtagctgggactacaggtgagtgccaccacacccagctaatttttgtatttttagtagagatgggggttcaccatgttgcccaaaatggtctcaatctcttggcctcgtgatccaaccatctcagcctcccaaagtgctgggtttaaaggcatgagccactgtgcctggcccagaattctttactgctaacacgagtgggcctggttctggaggatttcccagtgggtcctgaagaaccacagtttattggcttgtgggcaaaggggtatgtgtatcagttggcctttactgtgtaataaacagccacaaaaattactagctgaaaacagcagctacttaattagcagaagcctcttgaggatggacttgcaaaccaaagttgtgctggtttctactggtcaaagcaaggactggctcacataaaaaggagagagattgcaccttcagagagtaatctcaagacatctgtaatctaccacagggtgtcactgggcctctgtcaaggagcctattctttctgccaccagatctgtctaatagcttgtgtgacaatgcacttccttctgggtctctctccaagtgtagtaagtgtatatgggaatcactttattcaaacagtgtagtgcacttagttagaaagaaaaggtattaaggaagacttatatttaaaattgttatttatggtaacaacgaaaagtaacatacaaatttcaaacatcaagaataaaataaattaaaggtatgatcaatacacatcagtacaaagaggggaacacaatgaaacaaacaaaaaaaattagatgctagaaattaatccaaattattactaattaaatgtcaggcactaaatgtgcaacataaaaggattgttaattggtattattcaagtattttttctttttttttttttttttgtgacagagtttcactcttgttgcccaggctgcagtgcaatggcgtgatctcggctcactgcaacctctgcctcccgggttcaaatgattctcctgcctcagcctcccaagtagctggcattacaggcatgcaccactaggcacagctaattttgtatttttagtagagatggggtttctcagtgttggtcaggctggtctcgaactcccgacctcaggtgatcacctgccttggcctcccaaagtgctgtgattacagacatcagccactatgcccagcggtatacagattttttaaaactccagctaaagtatgtataaaaagacacatttttttaaaaagcatacagaaagactaagaagtagaggaaaatcaagctgatgtaactatataaatatctaacagaattagtggaacagaaaacatgcaagaaatagtgtagatttttcaagcgaaatatctgaaagaattcataaacctgggtactctctaccaagattaacacaagcaaagggaaagaatgcacaattaataagttattccagaatgcaaaaggagactgaagttatacaaccagcaaaaatgaaaaatataaaaagtataaatttttgctacacatttggaaataaaaacatgcctagaagaatattctcaaaatacttatgcaagccttagttgtctttttttttttttttttatgagatggagttttgctcttgtcacccaggctggagtgcagtggcaagaactcaactcactgcaaccttcgcctcccagattcaagcaattctcctgcctcagcctcccaagcggctgggattacaggcgcccgccaactcacctggctaattttattttttgaatttttagtagagacaaaagtttcaccgcattggccaggctggtctcgaactcctgacctcaggtgaccccctgccttgacctcccaaagtgctgtgattaaagccgtgaagcaccgtgcccaacctagttgtctttttttttttttttgagacggattctcgctctgtcgtcaggctggagtgcagtggtgtgatctaggctcattgaaacctccacttcaggggttcaagagattctcctgcctcagcctcctgagtagctgggattacaggggcacaataccgtgcccagctaatttttgtatttttagtaaagacggggtttcaacatgttggccaggatggtcttgatctcttgacctcatgatctgcctgcctcagcctcccaaagtggtgggattacaggcatgagccaccactcccagcctgataactgttttatttatttatttttatttttttggagatatggggtctgtgttgcccagactgatcttgaactcctggcctcaaggaatccttctgactgagcttcccagtgtgctgggattaaaagtgtgagccactatgaccagccagaagagataattttaactttttaaaatattttgcagtattggccgggcacagtggcttgtgcctgtaatcccagtactttgggagtatgaggcatgcagatcacctgaggtcaggagtttgagaccagcctggccaacttgatgaaaccgtctctactaaaaatacaaaaatcagccaggcaaggtggaggctgtctgtaatctcagctactcgggaggctgaggcaggagaaccactggaacccaggaggtggaatttgcagtaagttgagatcacaccattgcactccagcctgggcaacgagtgaaacactaactcaaaaacaaagaaacaaacaccaactcaaaaacaaagaaacaaaccaaaaaaatgaaaatatcttgtagtatttttaaatagagatgtggtttcgctatgttgcccaggctggtttgaactccttggctcaagggatctttttgcctcagcctccaaaagtgctgggattacaggcctgagccactattcccaacctagatgactcttatagattaagaatttagaaatagtaggaacatgccccactacagtatatgacagtcattatatacaaatatcattaagggacaattttttaaaaatcacaatgttattcaaacatagctccataacatattagtaaaggtcatgaagtatttttaagtgatccattatgtcacagtcgagcttatccaggaatacaaggttgatgtaacattggaaaagcaataaatacaaataccacatttatttaatttaatttatttatttttgacagagtcgcaccctgtcacccagcatggagtgcagtggtgcaatcttggctcaatgcaacctccacctcccaggttcaagtgattctcctgcttcagcctcccaagtagctgggattacaggtgcacatcaccacacccagctaatttttgtattgttagtagagatggggtttcaccatgttggctgggctggtctcgaactcttgacctcaaatgatctgcccacccccacctcccaaattgctgggattacaggcataagcccccacacccagcctgaccacatttgttttagaaaagcgcctttccatgcattcacttcttcaagttttttttttgttttgtttttgtttttttttttgagatggggtcttgctatgttgcctaagctggtctagaacccctgggctcaggccaccctcccaagtagctaaaactataggcatgcatcaccacatcatttcattgaagtatttattaggtaccatcatgagctaggtgcagttctaggtattgagttttatcagtaaataaacatgatcatcacagaggatgtgaaggaagcatttaataaattcaagaggaattcagcctcataaactatgaaatattgggaaataattcatcatgtaaaaactggatataaagaaaaaacttttcctgcaggacattgttgcaggaagtcagggaccccaaacggggggactggctgaagccatggcagaaaaacatggattgtgaaggtttcatggacatttattagttccccaaattaatacttttataatttcttatgcctgtctttactgcaatctctaaacataaattgtaaagatttcatggacacttatcacttccccagtcaatacccttgtgatttcctatgcctgtctttactttaatctctcaatcctgtcagctgaggaggatgtatattacctcaggaccctgtaataattgcattaactgcacaaattatacagcatgtgtgtttgagcaatatgaaatctgggcaccttgaaaaaagaacaggataacagcaatgtttaggaaacaagagagataaccttaaattctgaccgccggtgagccaggtggaacaaagccacatttctcttctttcacaagcaaatgggagaaatatcactgaattctttttctcagcaaggaacatccttgagaaagagaatgcacacctgggagtgggtctctgaactggcccccctgggtgtagccatctcttatggtcgagactgcaggggtgaaatagaccccagtctcccatagcactcccaggcttattaggaagaggaaattcccacctaataaattttagtcagaccagttgatctcaaaaccgtctcctgataagatgttatcaatgacaatggtgcccaaaacttcattagcaattttaatttcaccttggtcctgtgatctcgccctgcctccacttgccttgtgatattctattaccttgtaaagtacttgatgtctgtgacccacacctatttgcacactccctccccttttgaaaatccctaataaaaacttgctggtttttgcggcttgtggggcatcacggaacctaccgacatgtgatgtctgccccggacacccagctttaaaatttctctcttttgtactctgtccctttatttctcaagttggctgacacttagggaaaatagaaaagaacctatgtgaatatcggggctggttccctgacaggacataacctcttcaaaaaataaaaaagaaataaaagcctacagccaaaccaacaaaatagagtgcatatctcaccagaactgcaaagacaagtatgctggtattactacttttagttggtgttgtgcagcgggttaaaatcagtccagtaaagcaagaaaatatttagagagagcttcatcatcatacgaattttgggggtcattgttcagtccaaagtacttaatatgattcttttctctttccacatagagaatcagataatctataaataatgactcttactgttccactttaggagttaggtatacatacatatgtgtatatatatgtatatatatatacacatacacacacacacacacacacacacagtgaccccccaaatttcatatgaagttccaaacctcaatgtgactgtatgtgaaaagagaagggggcggggaggggggagaccgaccgacctatttgttggtctccatcgtgtgaaaacatgaggaagtgggcacttacatgccaggaagagagctctcactagaggttgaccatgctggcactctgatctcagacttccagcctccagatatgtgagaatataaatttgtgttttgggccagatacggtggctcaggcctgtaatcccagcactttgggaggccaaggcaggtggatcaccaaaggtcagatctgaccaacatggagatcagcctaaccaacatggagaaaccctgtctctactaaaaatacaaacttagctaaggtttgtggtgcatgccaataatcccagctactgagggtgaggcaggagaatcactggaactcaggaggtggaggttgcggtgagccaagatcataccattgcactccagcctgggcaacaagagcaaaactccatctcaaaaaaaaaaaaaaaaaaaaaaaaaaaatcctgtgtttttaacctcattgatttaaaattaaattaatttctaagccatttggtctgcggtattctcttatggttgtctgagctgactaaggcagatattggtactgagaagtgaggtactgcaattaaaaacaaacaaaaaaactaaaaatgtgaagcagctttgaaactgacaaatgagtagaggctggaaaaattctgatgtgcaagctggaaataaggttggtaagggttattctggtgaggtgtcattggggaatgaggaacatgctattgggaaatgaagaaaagacaacccttgatataaagtggtgaagaacttggcagaactgtattctagcattttacggaaggtagagcttgagacagataaaatggtatgtatcactaagatctgtaattaaagtgttaaaggacacaggaagcttcattattcctgagtgcttacaggaaaatgtgctgggaacaggccccccaaatctggccataaacaggcaatgagaaactggccataaacaaaatctctgcagcactgtgacatgctcgtgatggctatgacgcccatgctggaggctgctggtttaccagaatgagggcaagcaacacctggcccacccagggcagaaaactggaaaactgctcaaggcattcctaaaccacaaacaatagcatgagtgatttgtgccttaaggacatattcctgttgcagataacaagccagagcctgtccctttctttctcataaggaatacttatagctgatctacaatctataggaataatgtttatcacaggcttactgtcaataaatatgtgggtcaaactctgttcaagctcagctctgaaggctgtgagccccgattcccactctgcactatatttctgtgtctttgtcttaattcctctagagccactgggttagggtctccacgacccagctggtctcggcaaaaatgcaaaaggagacctgaattgcagaagaaattgttaaggaaaaaggaaccagaacttggagatttggaaaattctcagcctatccatactgcaaaaattagaaaacttgtactgaagagaatcctcaaagtgtggctgaacaatcatttgataaagagatcatgagtgggattcatggactatatcagccatcttaacagaagtgagaagagagactggattatactataagagacactgccacttacattgtgccacctaaaatggacagagaagacagaacagaacagtcaaggttgtcacacttcttattttacaagaaggggacatagaaataatcagctgtgaaagggcactggcagttatggatggtttcactcctgacatgctctgcaggatccatgggaacagaagagaaccttggaggagcatctttttaacaatccacctctggggcctacatcatcttggcttctggtaaattttgacatgaatgtgccacactggcagccactaaccaacaggggctgggatcaatctgcatgatttatctcgtacagaacttgttaatgctatgatcttaggaatctaatcaccaaggtgaggcagcctgcagtactgacctcaccatccatgacccttcttcacagatgcccagactcaggtaaccatgatgttgtattcagaacctgtaggtttaatttcagaccctcgggatgcatctaaggccaatctgtgagccattacaacctccaaaaggcatttaggactaatctgatgatctttgcactgccaataattaaagatggcaaccaatgggctaaatggtaacaacactcatatccttacattcatagtatttctccccagtgtgaattctttcatgcatacttaggcatgaggaaagagcaaatgctttcccaaattctttacatacaaaaggtttctctctggtaggagttcacaggtggggtgaggaatacagaaattctttcccacatatcttgcatttacctttctccactgtgagttttcaaatgtttactacgatgggaagaagtaatgaaggtcttcccacattcaacacattcataaggcttctctcctgtgtgaattcttctatgttgagtaagcgttgaagatctattgaaggctttcccacattccttacactgatagggtttctctccagtgtgatttcgtatgtgtatagcaaggcccgtgtactgagtgaaggcttggccacattccttacattcatagggttttattccagtgtgagttcttacatgttgagtaaggtgagttgatctagtgaaggctttcccacattccgtacatttgtgtggttttattccagtgtgaatttgaatgtgaacattaaaggatgaggaatttctaaaggatcttccacattctttacattcaaaggacttctctcctttatgagtttttgcatgtgcagaaagttgagaaaaattagtgaaggatttcccacagttcttagtcttttcggatttctttccagtatgaactgctacacactgctttaagtgtgaggaagttgtgatggctctctcacattcctgaaattcacagagtttctctccaatgtggattcccatgtgattatcaaggcttgcaaaatacttaaagccttttccacattccttacatttgtagggttgtcttccattgagaatttcaagatgcacagcaaggcctggagttaaggtgaagacttttccacatggattaaatttggaaagttcttgtccaatagaggcttccttgtgcacactgatgctgtcttttccataacaattaccctcaaaagtgttccctccattctgagctctcatgtgtgtcttaaggcaaaactgttcactgaagacctctccacaattctcacagagtttccatccactgtagcttcttgtctgctgatgaggggataaaggatttaaaatgttttcagacatattaagagatttcacccatctgaacacagaaacattattttgatgacaattattttactttttaatgtttaattttttttttttttttgagacagagtcttgttctatctcccagtctacagtgcagtggcacaatctctgctaactgcaaccttcacctcccaggctcaagtgattctcctgcctcagcctcccgagtagctggaaatacaggtgtgcactactgcactggggagtttttctactttttttgtagacatgggttttgccaagttgcccaggctggtctcaaactcctgagttcaggtgaactgcctgtcttggcctcccaaagtggtaagattacaggcgtgacccaccatgcacaacatgttttacttttttcagagctggggttttgctccattgcctggtctatagtgcactgcagtgatcatggctcactgtaacctcaaacgcctggctgggttcaagtgatcaccctagctaaaagctgtgtagctaggactagaggcatgcatcatccaattttttgatttatttatttattttattttatttatttttgagatggagtctcactttggctggagtgcagtgtcacgatttcggctcactgcaacctccgcctcctgggttcaagcggttcttctgcctcagcctgccaactagcatgtgcaaccagacccagctaatttttgtatttttcctacagatgggacttcatcatgttagccagggtgttctcaaactcttgaccttctcatccgcctgcctaggcctccgaaagtgctggaattacaggcatgaggcactgcgcccggcctcaatttatttttatagagacagggtcttggtatgtagcctaggctggtctcaaactctacaagaaacccccgtctcagcctcccaaactgctgggattacagccatgagctaccaagtcagcctactttgataaccataatttttacaatatttcttccatggtttcatttcctaccctcttgatctcttgccagaattctatgccactggctctaattgttcaaaaaaaaactgtctttttttgattgttgggggtggtttgagacagggtctcactctgtcacccaggctgggtaccatggcacaatcacagctcactgcagccttaaactcccaggctcaagccatcatcctgcctcagtctcctgaggagcctggattacaggtgcatgccaacgtgcccggctaattttttatttttttgtagagacagagtctccctgttgcccaggctggtcttgatctcctagactcaagcaattctcctgcctcagcttcccaaagtgctgggattgcaggtgtcagccattgcacccagccaaattgtgcagattttcatgaaactttaaatcctcaatgtctagttacatatgtgggaatatgtacttgtcggtatttttcagtgacaagttatacaggtatggaacatcagaaaattcatcacattcagactatctctccagagaccctgctccctcaagggtgcaggctacttctctctcaagtatctctcatttgtgctgtttctttttcatgccaactccacctcccgtgtttaagcaattctgcctcagcctcccatgtaactgggattacaggtgcccaccacacctggctaattttgtatttttagtagagacagagtttcaccatgttggtcaggctggtctcaaagtgctaacctcaagtgatccacacacctccacatcccaaagtgctgggattacaggattcactttcttttctttctttttttttttttttttttttttttttttttttttagatggagtctcacttggtcatctaagctggaatgcagtggtgcagtgctggctcactcagcaacctcggcctctgggtaagcaattgtcctgcctcagccgcccgagtaactaggataacgggtgcccaccaccacacacagctaattttgtatttttagtagagacagagttttcaccatgttggccaggcctgtctcaaactcctgacctcaagtgatccacctatctttgcctcctaaagtgttgggattacaggcatgagccaccacatccagcctctttttaaaatcagagatggtatattgctatactgcctaggctggtcttgaactcctgggctcaaatgatgatcccacctcagcctcctaagtagctgggattacagatgtaaaccacaccactaactgggctgattttttagaatggaattctcaatcttttctgagagaggaaattaagaaatatccctcatggcctgacacagtggctcacgcctgtaatcccagcactttgggaggtcgaggcagatggatcacgaggtcaggagatcaagaccatcctggctaacatagtgaaaccctgtctctactataaatacaataaattagctgggcatggtggtgggtgcctgtagtcctagctactcgggaggctgaggcaagagaatcgcttgaacctgggagttggaggttgcggtgagctgagatggtgccactgcacttcagcctggcagagcaagactccgtctcaaaaaacagaagaaaaaaataagtatccctcatgaatcttaccatttgtatcccagtgaatatttgattcttcaaaaaaccctgctgaagtgatgaccgtttggttctaggttgtatttcccattctgaagttaagcagaaaaagaaatctaagggtttagagaagaaatgtgttagtttaaaattagtcatttgtccttgttttcaaattaaacacagtatgaaaataaaagccacaggccaggcacggtgactcaggcccgtaatcccaggactttgggaggctgaggtgggtggatcacgaggtcaggagatcaagaccatcctgaccaaaatggtgaaaccctctctctagtaaaatacaaaaatatatatatatatatatattagccgggcgcgttggcatgtgcctgtagtcccagctactcaggaggctgaggcaggggaatcacttgaaccccagaggcggtggttgcagtgagctgaaatcacaccactgcactccagcctgggtgacagaacgagactccatctcaaaaaaaaaaaagaaaaaagaaaacaagagaaccttgaggattttggtatgtcaaaaatttggctataaggatgtggggtttattacacaactgatgtgtttagatagtttataacaaactgcttctgtgaaaattacaactgatggggaacaggaagagaaaattatcaggaaaggaaagcaggaaagatcaggataaagagcatatatcaaaatgataaacttaacaaaaaaacagaacagcttcgggaagctgaggcaggagaatggcaagaacccgggaggcagagcttgcagtgagcagagatcctgccactgcaccccagcctgggtgacagagtgagactccctcaaaaaaaaaaaaaccaaaaaaaaccaaaagcaaaacaaacaaacaaaaaaaacagaactggtagttttgtttgactagatggaaagtaaaagtcagagatatctgaaattctgagaaaaacagcttaaatcttctcaggcaaagtggatctttaaaaatcttttttttttttttgagtcaaagtcccactctgtcaccaggctggagtgcagtggcacaatctcggctcactgcaacccctgcctcctgggttcaagcgattctactgcctcagcctcccgagtaactgggactacaggcatgtgccaccatgcctggctaatttttttgcatttttagtagagacagggtttcaccatgttagccaggctggtcttgatttcctgaccttgtgatctgcctgcctcagccttccaaagtgctgggattacaggcgtgaacctccgggaccggcctagtctttattcttaggatttttttttagagatgaggtttcacaatgttgcccatgctagtatcaaactcccaggctccagcgattctcccacctcagcctcccaagtatctgggactacaggtgcaggccaccatgccaagcaaagtgatgttactcttacccacagaggccaggttcatgtagttctccagcatcacatctctgtagaggtatttctgagttgtgtccagtaaagcccactcctctggggtgaactccacagccacatcatcaaacgtcactgaatcctaagtcatcaaacacatgctggtttgagccaatgaacacttccaccaatattcactggagaatgaggaaaggggaaccttatactcacttatacgtggttctcaagtctcccatgatctactccagggtttaatgtctcaggagctcttgtgtctaaacaatcaaggttgacctcctacaggcatatgccttaaacagcactttttttctttctttctttctttttttttgtgacagagttttgctctttttgcccaggctggagtgcaatggcacgatctcggctcactgcaacctccacctcctaagttcaagtgattctcatgcctcagcctcccaagtagatgggattacaggcatgcaacatcacgcctggataatttttgtatttttagtagaaaaggggtttcaccatgttggccaggaaggtctcaaacttctgacctcatgtgatcggcccacctcagcctcccaaggtgctgggattataggtgtgagacaccatgcccatctgaacagtactttttaaaaaaatttttaaatcttttttgtctgatctatttatttttaattttttaattttttttaattttaatttttgattagaacagtacttcctaaacattaatttttatctatctagcatctatctatctatctatccaatctttttatttatttatatataaagacagggtcccactgtgccacccaggcacaatcgctgcttactgcagcttcaatctcctgggctgaagtgctcctcccaccccagcctcctgagtagctggaattacaggcatgagccactgcacactgcttacattatctcagcacaaacaggctaggagctcttcctgtcccattggtctctgggcagcacactcctcagcacactgcagatacctgataaatgctgatgagtgaattaattatttgataaaaggacactttcatctgctttatcatctgtcaccgcacccagcaatgtaagaaagatgcagttggcaccatgaaggtcaagcttaagtagtaattaccgagctactggaatgatcttcaagttaacactttatgtataggagacttcattccctggggaaattcacctggggattcagtccttgagtaaggcttcatttgctctaagaaaactctggagatgagtctgtctagaaggaaatgtgtctacctattggatgtaagtatgtcattttgtacaacggtacattttctgtttacctggtaagaatttgaccggtggtcctctaccatcgttcctatctttgtcttttcttcaaaaggacagattggttccctgggaaaaaaccctagtggaaaagtaagaaggcatgagaagccagagctgcccacattcttatgcccagaagtcattccatcctagcttgaaattcccatatgctcctgcacactcgaaaaaactacacacacacaacacttccatgaaatgccgtagtagtcctgtatcacctagacccagaaaagcagatatgggctgagctgcctgttgtgtaaagggtaacagtttcatttttcaaggaaacttacaccctgaaaaatgtgactatctgcccatagtagtaacactcatgaagcttatgtagcatttccaaaggcacacaaaccagggctgaattctaaaacagcattctgactgggcacagaggctcatgcctgtaatcccaacattttgggaggccaaggtgggcaaatcactcgaggtcaggcattcaagaccagcctggccaacatggcaaaaccccgtctctactaaaaaaaaaaaaaaaaaaaaaaaaaaaaaaaaaaaaaaaaaaaaaaaaactacaggaggctgaggcagagaactgcttgaacctgggaagtggaggttgcaatgagtcaagatcatgcaactgcacttcagcctgggtgacagagtgagactccatctcaaaaaaaaaaaaaaaaaaaaaaaaattagctgaacctggtgatgcatgcttgtgatcccagctacttaagaagctaaggcaagagaattgcttgaacccagcaggcggaggtttcagtgagccaaggttacaccactgcactccagcctgggtgacagagcaagattcggtctcaaaaaataaataaataaaaatatgaataaaataaaagagcattctgcgtcttacttgaattcctccttaaagaactagcagcagccaggcacggtggctcatgcctgtaattccaacactttgggaggccgaggcaggcaaatcacctgaggtcgggagttcaagaccggcctgaccaacatggagaaacccgtctccactaaaaatacaaaattagcctgtggtcccagtgactcgggtgggtgaggcaggagaattgtttgaacccaggaggtggaggttgcggtgagctaagatcatgccattgcacttcagcctgggcaacaagagcaaaactccatctaaaagaaaaaaaaaaaaagcagcatgcctgttcaggcccagctcactggactcttatgttgtggagggcgacctaaagcagaatctctgaaaaagagcatcaacaaggacttaccatgggacatatcaaaggctgacatcctctgaagctgatggtgagatgtgcctcaatgctgtctttcttgatgccaagatcgcctcagggcagcttatgaatctaggtggatacaggcaatctccattcccctttgtacagggttatctgaggccctgttcataccaatcaccaaacaacaagcatcaaacatcagtcattgaacattatgcatgagctttctctctgcaggtgacagatgtgaaggccaccaaaaactgtatactcagtatcgtcactcagtaatgatagtattaataacagcaactgacatttattgaggactagtatgtcagaagtagctctagtagctttatatatacatgctcacttaattatcataaccatccttcccaacagctatcattacctatatgtatctatgtatctatccatctatctatttattgagacagggtctcattctgttgcccaggtttaagtacaatgacacaacaacagctctctgtagcctacatttcccgggctcaagtgatcctcccacctcagcttcctgaatagctgggaccacaggtgtgcatcgtcaagccttattattatattattattattattttgagacagagtctcactctgttgcccaggctgaaatgcagtggcgtgatcttgactcactgcaacctctgcctcccaggttcaagtgattatcaggcctcagcctcccgagtagctgggattacaggtatgcaccaccatgcctggctaatttttatatttttagtaaggatggggttggtcaggcacggtggctcatgcctgtaatcccaacactttgggaggccaaggcaggtggatcacgaggtcaggagttccagaccagcctggccaacatagtgaaaccctgtctctactaaaaatagaaaaaattagctgggtgtggtggtgggcacctggaatcccagctactcaggatgctgaggaaggagaatcgcttgaccccgggaggtggaggttgcagtgagctgagactgtgccatcgcactccagcccaggtgacagtgcgagactccatctcaaacaacaacaacaaaaaagaaatgtgtaaggaaggggtttcatcatattggccaggctggtctcaaacaagtgattctcccacttcagcccccaaagtggctgggactacaggtgcacaccactggatctaattttttgcatttttagtagaaacaaggtttcaccaggttgcccaggctggtctcaaactcctgggctcaaacaatcctcccaccttggcctcccaaagtgctgggataataagcatgagccaccatgcctggcctattacctctattaatactgaaaaaaacctacattcaaataatcctagtaattggtctgatatttgaccctagagcctgatcccctgtatatgctgttaccccccagtatgaccagaagacagcccagacttgcacagaacaactcagtagtcactagccacgtgtgttattgataacttcattgtgtacctaagatgatgaaaaacagaatttaaaatattcaaaagatggccaggcgcggtggctcacacttgtaatctcagtactttgggaggctgaggcaggcagatcacctgaggtcaggagttcaagaccagcctggccatcatggcaaaaccctgtctctactaaaaatacaaaaattagctgggcgtggtggcacacgactactcagaaggctgaggcaggagaattgcttgatcccgggaggcagaggttgcagtgagccgagatcatgccactgcactccagactgggtgacagagcgagactccatctcaaaaaaaaaaaaagagagaaagaaaatatagacaacaggccaggcacagtggctcacgcctgtaatcccagcactttgggagtaccaaggtaggcagaccacaaggtcaggagatcgagaccatcctggctaacacaatgaaaccccgtctctactaaaatacaaaaaattagccagttgtggtgttgggcggctgtagtcccagctacttgggaggctgaggcaggacaatggcgtgaacttgaggtcaggagttcaagatcagcctagcccatatggtgaaacctcatctctactaaaaatacaaaccttagccactcatggatgctgtagtccaacctactcaggaggctaaggcaggagaatcactcgaacccgggaggtgcccacctcagcctcccaaggtgctgggattacagatgtgagccactgcgcctggccagctattgttctaaatgttgttctttactgaaaagaatgaacacaacagttgccacttggtacacaactaatgtagataatggccttatctctatgccaatttgaaaaaacagccagaactggatgggtgcagtggctcacacctgtaatcccagcactttgggaggccgaggcgggtgggtcacgaggtcaggagatcgagaccatccggctaatgcagtgaaacctcgtctctactaaaaatacaaaaaaaaaaaaaattgccaggcatggtggcaggcgcctgtagtcccagatactcaggaggctgaggcaggagaatggcatgaacccaggaggtggagcttgcagtaagtgagattgcgccactgcactccagcctgggtgacagagcgagactccatctcaaaaaaaaaaaaaaaaggaaaaagaaaagaaacagccagaatcactccacaccattgcctccagactgcataaattttccttcctgttcacttccaaaatatagtcttcaagggtcctgacattccaaaaatcatcacactggttgactgtgtagatgggtttttttttgttttgtttttgttttttgagacggagtcttgctcttatcgcccaggctagactgcagtagcacgattgccaccactgtagctattgttcttttttttctttttctttttttttctgagacagagtctcattctgtcgcccaggctggagtgcagtggcgcgatctcggctcactgcagccgccgcctcccaggttcaagcgattttcctgcctcagcctctcaagtagctgggactacaggactccagagtagctgggactccctagttcaagtgattctcctgccacagcctcccaaatagctgggattacaggtgcatgccaccattcccagctattttttttttgtatttttagtagagatggggtttcacaatgacagccaggctggtcttgaactcctgacctcaggtgatctgcctgccttggcctcccaaagtgctgagattacaggtgtgagccaccacacctggtctgtgaatttgttttgttttgttttgttttttaagacagagtttcactcttgttgtccagccaggagtgcaatggcacaatctaggctcactgcaacctccgcctctttggtttaagctattctcctgcctcagcctcccaagtagctgcgattacaggcatacatcaccacacctggctaatttttgtgtttttagtagagactgtgtttctccacgttggtctggatggtctggaactcctgaccacgagtggtccacccgccccagcctccaaaagtgctggaattatagttcacttgttttaacgttccttaaagtttaattttccccaaggaggggctgcacattttgggttggatttgttatcagtacttacaaaaactattatgttatggttaagttgttccaccactggccagtggactgtcttcaagatggctcctttccttttgacaagaccctaacagtcactgattgttttcacacagggcatgtgttccaacattatcttgtacatttcttgcacggtttggcttatggatgtaatcatatatgtgatctgaggacttttgggtttctgccgtttttgaaaagtttctcagggctggatgcagtagctcacacctataatcccagcactttgggaggctgatgcaggtggatcacctgagggcagaagttcgagaccagctgggcatggtggctcatgcctgtaatcccagcactctgggaggccaaggcgggtggatcatgaggtacagcctgggcgacagagtgagactctgtctcaaaaagaaaagaaaagaaaagaaaatatctcaaataccaccgtttatataacacatttctatatatgcacacatgtgctttaaaaaacagctctaggccaggtgtagtggctcatgcctgtaatgccagcactttgggaggccaaggcaggtggctcacctgaggtcaggagtttgagaccagcctggccaacatggtgaaaccctgtctctactgaaaatacaaacattagctgggcatggtggcacacgcctgaagtcccagctactcaggatactgaggttggagaattgcttgaacctgggaggcggaggttgcagtgagccaagatcgtgccactgcactccagcctggggacagagcaagactctgtctaaaaaaaaaaaaaaaaagcagtttctgtggctacaacgaagtgaaaaaaactccaaggagatggtaagagaatcaaatttccatatccacaacacccttctccttaatccagcaccaagaatgtggaaaatttctaccaattcagtttctacactggaaaaaactgagctcaaggtggacaaccaccttctccaccatcctgggttccctggtaaaagatcagtccctccctgtctcaacccacaggaagcatcacaagagcctgaagggagaaataccctgaggacatccagggacaaagaggggaggcaggactaccatccccagccctgggagcagcatactgtaggggtatgctacacaggtcccctgggcagaacacacagccagccttcccacattgctggaatatgccctttaggactccccaattctggatgggcagtattcttgactgtttgctagagcagaggcaaacatgggtttaagattccatctagtgctgaaaaggaggcggtgacctagggaaattttaaagaaaggaaatcattttgggaggccgacacaggtggatggcttgagctcaggagttcaagacctgcctgggaaacatgatgaaaacccatctctactaaaaagtacaaaaagtagccaggtgtgatggcgtgcacctcacctacttaggagactgaggtgggaggattgcttcagcatgggaggtagaggatgcagtaagccataatcacaccactgcactccaggctaggtgacagagagagacctagtctttaaaaaaaaaaaaaaaaatcaaaagaatttaagaggctggttgctatggctcatgcctgtaatcccaacactttgggaggccgaggtgggtggatcttctgaggtcaggagttcaagaccagcctgaccaacatagagaaacactgtctctactaaaaatacaaaattagctagacatggtggtgcatgcctgtaatcccactactcgggaggctgaagcaggagaatcgcttgaatccgggaagcagaggttgtggtgagccgagatcgcactattgcactccagcctgggcaacaagaacaaacctccgtctcaaaaaaaaaaaaaaaaaaattacacaatggaactttgttttggttttggtatgttgacaaaccaaaatctatgggataaaagcagtactaagggagaattttacagcagtaaacacatacatcaaaaaagtagaaaaatttaaaataaacctaatgataccccttaaaatactagaaaagcaaaaacaaaccagattcaaaattagtagaacaaaagaataaagaccagagccaaaataaaattgaaaataaaaaacaatacagaagatcaataaaacataaagttgattacttgaaaagataaacaaaattaaccttcggctagactaagggaaaaaaatgacccaaataaaataaaaaatgaaaaagaaaacagaacagaaaccacagaaatacaaccaatcattagaaactattatgaaaaactatatcccaacaaactgaaaagcctggaagaaatagacaaattcttgggtgcatacaacctaccaagactgaaccatgaagaaatagaaaacctcaacacaacaataacaagatcaaagtgataacaaaatgaatcccatcaaagaaaagcccaggacctgataacttcactgctgaatcctaccaaaaacttaaagaactaataccaatactacttgaactcctcaaacaaaattgaagaggagagaatatttccaaacttagtctacaaggtgagcattattctcatatcaaaaaccagacaagagcacaacaacaacaacaaaactacacgccaatatcactgatgaacatacctgcaaaaattctcaccaaaatattagcaaaccaaattcaacacattaagaaaatcattcatcacaatcaagtgaaattcatcgtagaaatacaaggatggttcaacatatgcaaatcaataaatgtgacgtaccaaattaacagaaccaagaataaaaaccgtatgagatttccacagatgctgaaacaccatttgataaaattcaatatccctttttgacaaaagtccccaacaaactgtgtatagaacgaatatacctcaaaataataaaggccatatatgacacacccacgtccaacatcatactgaacagggaaaaattgaaagtctttcctctgagatcttgaacagaacaaggatgtccacttttaccacttctattcaacataatactataagttctggccagagcaattaggcaagagaaacaaataaagggcatctcaactaaaaaagaagtcaaattagccatgtttgccaatgacatgacctttttctccttagaaacagggtctccctctgttgctcaggctagaatgcagtggtgatcatagctcactgcagccttggtctcctgggctcaagtgatactcctgcctcagcctcccgagtagctagaaccacaggcatgtgtgacaatgctaactttttttttttttagagactgggggcagaggggtcctcaatatattacccaggctgaccttgaactcctgatttcaagtgatcctcttgctttggcctcctaaagtgctgggattacaggcatgagccaccatgctcagctgacataatcatatttagaaaaacctaaagactctaccaaaaacctgttagaactgataaatgaattcagtaaatgttcaggacacaaaatcaacatacaaaaatcagttgcatttatatacgccaacggtgaacaatctgaaaaagaaatcaaggaagtaatcacatttacaatagctgcaaagactataaaatgccagcaccaggcatgatgactcacaattgtaatcccagaattttgggaggctgaggtggaaggattgcttaagcccaacagttcaagaccagcctgggcaacatggcacggctcagtctcaattaaaaaaaagaaattagccaggcatgatggcacacacctgtagtcccagctactcaaaagagactgaggcaggaggattccttgagcccaggagttcaaggctgctgcatgagctacaactgcaccactgtactccagcctgggcaacaaagtgagaccccacctctgaaaaaaagagaaaataaaaagtaaccaaaaatgtgaaggagctatacaaggaaaactataaaacactgatgaaacaaactgtagagaatacagaaaaaaaatggaaagacattccatgctcatggattagaagaatattgttaaaatgacaatactacccaaagcaatttacaattaagagcaaccgttatcaaaatagcaatgacattcatcgcaaaaatagaaaaaaaatcctaaaatttatatgcaacaataaaagacttcaaacagccaaagaaatactgaacaaaaagaacaaagctggaatcatcacactgccttacttcaaaatatactacaaagctatcataaccaaatcagcatggtactgacataaaaaaaacaaacaaacacatagatcaatggaagagaacaaagaacctaaatacaaatctacacatgtacagacagctcattttcaacaaaggcaccaaaagcatacaatgggaaaataacagtcttttcaataaatgctgctgggaaaactggataaccatatgcagaataaaactagatgccatctctcagcataaaaaaaaaaagtcaaaacagattaaagacttacatctaacacctgaaactataaaactagtagaggaagacccttgggaaacaatccagggcattggtctgggtaaagatttcttgggaagatctcaaaagcacaggcaacaagagcaaaaacaaacatatgagattacatcaagctaaaaagcttctccacagcaaaagaaacaatcaacaaagtgaagaaacaatctacagtatgggagaaaatatttacaaactatccacctgggattaataatcagaatatataaggaactcaaacttgataacaaaaaaaatccgataaaaaaatcagcaaaaggtcagaatagatgtttctcaaaaaaaagacatacaaatggccaacaggcatacaaaaaaatgctcaacatcactaatcatcagagaaatacaaatcacacataaccacaatgagatatcatctcacctcatttagagtggcttttataaaaaagacagggaataacaaatgctgatgaggatatggtgaaaagataatccttgtatgcagttggtgggaatataaattagtacagccactgtagagaacaatattcaggtgtggtggctcaggcctttaatcccaaaacttgaggctgcggtgggagatcacttgagcccaggagttccagaccaggctaggcaacacagcaacacctgtctgtacacacatgcacgcacaaaacctgtctgaaactggcaagacctgtctgcatgcacgcgcgcgagcgcgcgcgcgcgcgcgcacacacacacacacacacacacacacacacacacacacacaaccagtcagggacagtagctcatgcctgtaatcccagctctttaggaggccaaggcaggcagatcatttgaggtcaggagtttgagaccagcctggtcaacatggtgaaactctgtctctactgaaaatacaaaaattagctgggcatggtggcgtgcacctgtagtcccagctactccagaggctgaggtaagagaattgcttgaacccaggaggcggacgttgcagtgaaccaagatcgtgccactgcaccccagcctgagtgacagagtgagactctgtctcaaaaaatcaaagaaacaaacaaaaaaacttagccaggtgtattagtggaggcctgtagtcctggctactcaggaagctgaggtgggaggatcacctgagcccaggaagtcaaggctgcagtgagccatgattatgccatggcactctagcctgggtgacacagcaagactatctcaaaaaaaacaaaacaaaacaaaaaaaacagtatgggggtttctcaaaaaattaaaaatagaactaccatatgatctggaatcccattgggtatatatccaaaagaaaggaaatcaatatatttgaaaagatatatatacattcccttgtttaccgcagcactactcataatagccaaaatatggaatcaacctaagtgtctaacaatgaaagaatgaataaagaaaatatggtatatatagacagcagattattattcagccataaagagaatggaattctgtcatttgcagcaactggatagaactggaggtcatcatggaagtgaaataagccaagcacagcagacaaataccccatattctcacatgtgggagctaaaaagtggatctcatgagcatagagtacagattgatggttactagaggccagaagggtaggaaggagacggagataaagagaggttgattaggctgagtgaggtggctcatgcctgtaatcccagcactttaggaggccaaggcgggcagatcaccctgattatgtgagatcaggagttcgagaccaacctgtccaatatggtaaaaccccgtctctactaaaactacaaaaattagccgggtgtggtggtgcaccccttaatcctagctactcgggaggctgaggcaggagaatcacttgaatccgggaggaggcagaggttgcagtgagccaagatcatgccactgcattctagcctgggtgacggtgagactccatctcccaaaaaaaaaaaaaaaagaggttgattcatcggtaaaatatacagttagaagaaataagaactggtattcaatagatcagtagggtgactacacttaatacgcatctatcatacatttcaacacagctaagagaataacgatgttcctacaatatagaaaagataaatatttaaggtgacaggtatgctacttaccctgattatgtgaatgtatcaaattatcacatgtactctgaaaatatgttcatctattatgaatcaaaaaaatttttctggattgtaaaatagggagtgggagattctggggccaccatgtctgtgggtaaagatattcccttgtctggatcatgtaaagacatccctccaagatgtcactccaagttactgcacctaataccacctaccattaacaaggagcaatgagccatgattatgccattgctctccagcctgggtgatccagcaagactttgtctcaaaaaaagaaaaaaaacccagcatggaggtttctcaaaaactaccatccatagacctcttgaattttggaggcaacacatacatttgcatgtactttaacgccccacacagttacctgtaaggattctagtttcaactgtagacaagagcaatttcaggctgcaatgcaagcttcctaagcacttggtccacctgatccagcagacccagtgatactcaacgtgtccatgttaaatggcatgttatttattggaagcctccggcatgcaccaacagaagatgtagagtacagccctctggtattgcagagtcaatccatgccctcttgtgcagattaactgtttttctcttgagaaacaggttgtggtttgccactagcacatgacagagaatgaacaactagtcatgggacatgaagtaactaaggctgaactgagtaatttgagactttctggtccccaaagcatgaagtacatactgtcacccattatcaaacaactgttgtcagcctctcctctggacccaattccaagtttgtaggaaatcgcatgaaataaaggaatatttacacacaccatgagaatccaatcagaaatatctgattgtatgactttctaagagaatgagtgtgactctctgaaagtcaatataatggacagtaataactgttataggcaaaaagacactgaagacactgacaattgcaatgcaaaaatcttgaatggatcttagatccaaaaacacccaagagcatacgttgaatcaatgaggagaattttagttattacggaaagtagacattagatgacattattatttttaatttaagtgaaatactagtattgtggttttagtatgacaatgcctatttttaggaggtgcattacaaagtatttaaaggtcaagcatcacatgtacaatttatgctcaatttacactcaaattgttcactgtaagatttacatgaggagaaagaaataaaatgctaaaaaattaagtaaatctactagactgggtgtgttagatgttcaagttttccttaggatcaaatttttcagaaaaaaatgtaaaaactacacttagtccaaacatgctcttaataaattatacagatactagatattttattacactgatactagaatactattctgattataatagtaaataattctagtgtcagtgtaataaagcctccattctttcttcctggttcctggaggcctctgttttgaagcactgtggggaagtacagacctaagaacttcagatgaagagaatagttgagtattattgcctttcttttttttttttttttttttttagacagtttcgctcttgtcacccaggctggagggcagtggcgggatctcggctcaatgcaacctccgcctcccgggttaaagtgattctcttgcctcagcctccggagtagctgtgtaagatacaatatatttctctgaatttctcttcaaaagttcagcctgtaaacttccttgttctttgttctcaaactcaactttcctgttctccatgcctccttgcctctagttactgtaaacaaccttcccatcagctctaatcaataactcacatctgttcccttggctactcattctgcagctattccactctttgaaactgcacatcccaccatcatgactcacacatccccctacccttccttatttggggaaaatattcacagatagccaatagggtcagtttagattctgcggtctgaccctaacccacgggggagagacacagaagtagggacccagcgttagaaataaaaaccccttcccctcccttatctggtgtactctcgccatcactccatccacgagactcacccttctatagaaataaattgcgttgctgagaaaacttttgcctgagtgctggtttcactttgcagcacccagcgttttatttttttatctccaacagctgggattacaggggcccaccaccaagcccggctaatttttgtatttttagtagagacagggttttaccatgttggctaggctagtctggatctcctgacctcaggtgatccgcctgcctctgcctcccaaagtgctgtgattacaggtgtgagccagtgcatctggcctggctttaagtagaaaggcttgcagctggtaacaattagaaaaaaaataacctgcaagaaaataaaaattaaaaactaaaggcttagtctacacgcgttcatatttacatacaaaaacgggcacaccctaaacaactatgttttttccatctgaatgtaatgtgtcaaaaataagtggcgggtggatcacttgaggtcaggagttcgagaccagcctggccaacatggtgaaaccccatctctaccaaaaatataaaaaattagccaggtgtggtggtgcacgcctggaatcccagctactcgggaggctgaggcaggtgaatcatgttataaagttttcatgccacaaaaaaaaagcactcaaatataacattttcttttctcagcaaggcaatttacttctacagaagggtgtgccctcacagatggagcaatggtgagcacacaccaggacaagggaggggaaggggttcttattcttgaggaaagtggcccctgccgctttgtccttccccgatggctagggttagaccccacaggctaaactaattccaattggctaatttaaagagagtgacagggtgagtggtttgttggggaaaatggttataacagagcaggaaattggaatgagtcagggtggaaaatgagtcagggtggagtaagtaatcgaaataagtctgggtggagcaggtaatcagaatgagtcagggtggagcaggtgatcgaaaaaggttgctttacggagaagtttaaaagtagaaggcaaagaattaaacatactgacatattgattttttaaaaagaaatttaaaactcatatctaacaatcacttgaacccgggaggtgaaagttgcagtgagccaacatcgtgccactgcactccagcgtgggcgacagagtaagactccaaatcaaaaaaaaaaaaaaagtaaaggacatcaagacaacgccagattctcagatgagacattttttagcaaataaatggaagtcacagccctcttgaaaccatttttccgccgttgctcaccaggaacatgccggaagagataggttccagacgcgggagaatgcggggccagagccaacctcaccagaagggcagaaatccttttcctttcggaaagaaaaaaactcccaaaggttgctttccaagcttttcaagagaggagcacagcggatgaaagtactcaagaaaacacccggcggaggcggaacaaacacacttcccgacgcagccagacggactgtgcggcctctcggaactggccagaggccgcaccaggaggactgacagcccctagaaaagcgagtgaaactaggcggatctgagaggctcctgggcgaccacgcccaatccttcctttgccgccccgctggtatgtcccggacccccaagcaggtagaactcaccacagcggggtggactccaccacaataaaggttaaacggcactgaccatgctgagccacagccggtaaagatggcggtggcacactgacgtcacttccgctccgagcctccggccgggtggggctccagggcttgagtttcaggcacgtaggacaaagaaattctagtttcctcctgggtgggtgccggacagtgcctggggttggctcagggagcgggatgcagaaacgggttcagagaaaaagatgagtttagaaccggacctctggacggaaccgtgggcgaggggtggggcccatatttgggggcggtttagaggtgggacccggcctagcccgcgtttcaggtgcccagacgggttggaaaggcggggatgggggatgggacgcaccccagaggatgctcctccaaagcttatcctgggcgggctcagtggctcacgcctgtaattccagcactttgggaggctaaggcaggtggatagcttgagtccaagagttccagaccagcctgagtgaaatagcaagaccgtgtgtctttttttttcttttctttttttttttttttttttttttgagacagagtttcactcttgttgcccaggcctgtgcccggctcgaccctgtctctattaaaatatatatataaggccaagcgccagtggttcacgcctgtaatccctgcactttgggaagccaaggcgggcggatcacctgaggtcgggagtttgacaccagcctggccaacatgctgaaaccccgtctctactaaaaatacaaaaaaatagctgggtgtggtggcaggcgcttgtaatcccagctactcaggaggctgaggcaggagaatcgcttgaacccgggaggcggaggttgcggtgagccgaggttgcgccactgcactccaatctgggggacaagagcgtgacttcatctcaaaaagaaaaaatatatatatatgtgtgtgtgtgtgtgtgtgtgtgtgtgtgtgtgtgtgtgtcaagcttttttgtatgccgctcctcatgttcctggagcctttccatgattcttccatattaaacctgccagtgatagatggcatggtctgtctcttccattcagtcattctttctgtaggcctttattttttctttttctttttcttttttttttttttttgagacggagtctctctctgtcccccaggctggagtgcagtggtgcaatctcggctcactgcaagctccgcctcctgggttcacaccattctcctgcctagcctcctaagtagctgggactacaggcgcccgcgaccacaaccagctaatttttttgtattcttagtagagacggggtttcacggtgttagccaagatgatccccatctcctgacctcatgatccacccgcctcggcctcccaaagtgctgggattacaggcgtgagccaccgcgcccagcctattttttcattctttattttatagaacctgctgtttccattgcgttttctttttacttttttttttttttttttttttttttgagactggagtctcactctgttgcccgggctggagtgcagtggtgcaatctcagctcactgcaacctccgtctcctgggtgcaagtgattctcctgcttcagcctcctgagtagctgggattacaggtggctgccactatgcccagctattttttctattttcagtacagagggcatttcaccatgttggccaggctggtctcaaactcctgacctcgtgatttgcccatctcagccttgcagaatgctgggattataggtgaagggggccagcccctccacacctgtgggtatttctcatcaggtgggatgagagactgagaaaagaaataagacacagagacaaagtatagagaaagaacagtgggcccaggggaccggcgctcagcgtccagaggacccacactggcaccagtctctgagttccttcagtatttattgattactattttcactatctcagcaaggggaatgcagcaggagaacagggtgatagtggggagaaggtcagcaagaaaacatatgagcaaagaatctgtgtcacagataagttcaagggaaggtactatgcctggatgtgcacgtaggccagatttatgcttctctccacccaaacatctcagtgtagtaaagaatagcagagcagcattgccaccagcatgtctcacctccagccacagggcagtgttctcctgtctcagaagagaacaatgtacattcgggatttataccaagacattccgttcccaggggcattcaggagacagaggccttcctcttttactaatgctcctcagcacagacccttcatgggtgtcaggctgggggacggtcaggtctttcccatcccatgaggccatatctcaggctgtctcagtggggagaaactttggacaatacccagctttcctgggcagaggtccctgctgctttctgcagtgcatcgtgcccctggttaattgagaatggagaatggtgatgactttcatccagcatactgcctgtaaacatattgttaagaaggcacatcctgcacagccctagatcccttaaaccttgattccatacaacacgttttgtgagcacaaggttggggctaaagttacagattaacagcgtctcaaggcaaaacaattgtttagggtacagatcaaaatggagtttcttatgtcttccttttctacatagacaaagtaacagtctgatctctttcttttccctacaataggcatgagcaaccacgcacagccacattttcaatataataatactttctataaatcttgattttttttttcttcaccaagtatgtatttctggctgggcacgttgcctcatgcctgtaatctcagcacactttgagaggccaatatgggaggatcgtttgaggccaggagttggagacaagcctgggcaacacagcaagaccctgtctccttaaaaaacaataaaatttttaaaaaattccttttttcttttattttttgcgatggagtctcgctctgttgcccaggctggagtgcattggcacaatcttggctcactgcaacctctgctccctggttcaagcgattcttctgtctcagcctcccaagtacctgggactacaggcctgcgccaccatgtccagctaatttttgtatttttagtagagacgtttcaccatattggcttggctggtcttgaactcctgacctcatgatccacccactttggccttccaacgtgctgggattacaggtgtgagccactaagcctgaccaaaaatatgtatttctattgttatttttctgatcttaccacatgggccaggaccgcatttcctatgttgtaaaatagcagtaataccagacattctccccaagtttattcagaaatgtaacataatcccaataaaaacaccaaaattttttctggagttaggtacattgatgctaaaagtttatatggaaaaagaaaatctgataataagcaagaaaacaaaaacaaggccgggcactgtggctcatgcctgttatcccagcactttgggaggctgagacaggcagatcacaaggtcaggagatcaagaccatcctggccaacatggtgaaaccgtgtctctactaaaaatgcaaaaattagctgggcatggtggcacgtgcttgtagtcccaactacttgggaggctgaggcaggagaattgcttgaacacgggaggcggaggttgcagtgagctgagatcgcaccattgcaccccagcctgggacagagggagactgtgtcaaaaaaaaaaaaaggaaaacaaaaacaaaagcaatgatgagcagcagatattaaaacatactattgacaattttcacgcaagacaaagaattattttaaaataaaaataagaaaacattctataaagcctctataattaaaactatgtggtactagtgcatgaagcagaaacagactaataaaatatctataaatagacccaagaacatgtagaaatttggttcataaatgtggtattttgctgggcgtggtggctcatgcctgtaatcctagcactttggtaggtcaaggcaggaggatcacttgagttcaggagttggaaaccagcctggccaacatggtgaaactccgtctctactaaaaatacaaaaaataggctcggctggtggctcacgcctgtaatcccagtactttgagaggccgaggtgggtgaatcacctgaggtcgggagttcaagaccagcctaaccaacatggagaaacccccatctctactaaaaatacaaaaatagctgggtgtcctccctctccctctccctctccccacggtctccctctcccgctctttccatggtctccctctgatgccgagccgaagctggactgtactgctgctatctcggctcactgcaacctccctgcctgattctcctgcctcagcctgccgagtgcctgtgattgcaggcgcgcgccgccacgcctgactggttttcatatttttttggtggagacggggtttcgctgtgttggccaggctggtctccagctcctaaccgtgagtgatccgccagcctcggcctcccgaggtgccgggattgcagacggagcctcgttcactcagtgctcaatggtgcccaggctggagtgcagtggcgtgatctcagctcgctacaacctccacctcccagcagcctgccttggcctcccaaagtgccgagagtgcagcctctgcccggccgccaccccgtctgggaagtgaggagcgtctttgcctggccgcccatcatctgggatgtgaggagcccctctgcctggctgcccagtctggaaagtgaggagcatctctgcccggccgccatcccatctaggaagtgaggagcgcctcttcctggccgccatcccatctaggaagtgaggagcatctctgcccggccgcccatcgtctgagatgtggggagcgcctctgccccgccgccccatctggaatgtgaggagcgcctctgcccagccgcgaccccgtctgggaggtgaggagcgtttctgcccggccgccccatctgagaagtgaggagaccctctgcctggcaaccgccccgtctgagaagtgaggagcccctccgcccggcagccgccccgtctgagaagtgaggaaaccctccgcccggcagccaccccgtctgggaagtgaggagcatctccacccggcagccaccccgtccgggagggaggtgggggtgtcagcgccccccgcccggccagccgccccgtccgggagggaggtgggggggtcagccccccacccggccagccgccccatccgggaggtgaggggagcctctgcccggccgccccttctgggaagtgaggagcccctctgcccggccaccaccccgtctgggaggtgtacccaacagctcattgagaacgggccatgatgacaatggcggttttgtggaatagaaaggggggaaaggtggggaaaagattgagaaatcggatggttgccgtgcctgtgtagaaagaagtagacatgtgagacttttcattttgttctgtactaagaaaaattcttctgccttgggatcctgttgatctgtgaccttacccccaaccctgtgctctctgaaacatgtgctatgtccactcagggttaaatggattaagggcggtgcaagatatgctttgttaaacagatgcttgaaggcagcatgctcgttaagagtcatcaccactccctaatctcaagtacccagggacacaaacactgcggaaggccgcagggtcctctgcctaggaaaaccagagacctttgttcacttgtttatctgctgaccttccctctactattgtcctatgaccctgccaaatccccctctgcgagaaacacccaagaatgatcaattaaaaaaaaaaaatagccaggtgtggtggcaggtgcctgtaatcccagctactcgggaggctgaggcaggagaatcgcttcaacccaggaagcagaggttgcagtgagccgagatcgtgccaatgcactctagcttgggcaataaaagcaaaactccatgtcaaaaaaaaaaaaaaagtggtgtttcagatcgatagggaaaaaatgccatttgtaatggaaagtctaagacagttggttagctatcagagaaaagatgaaattaaatctatacttcatatcatatacaatatactccaaatggactagtaatctaagtgtgaaaaataaaaccatacacgcatgtaaggtgttcaagtgatttcttggctgagtaaggaaaaagatgtaactacaaggcggcaatagcatacaagcttcatttgggatgtgctttcacaggttagcagttgcggaggtaggaaacagcaagagagtatccacaggcttctacctgtgggtcacttctcagaaagcgtggaaaggaagagagactcccagaggagaaagggaatcaaagagggggcttataaataactaaatgatgatactcaccaaactgacagcatatcttccagttaaaaagctctgaagggccgggcaagaaggctcatgcctataatcccagcactttgggaggccagtggggcggatcacgaggacaggtgttcaagaccagcctgaccaacatggtgaaaccccatctctactaaaaatacaaaaattagccgggcgtggtggcgtgcacctgtaatcccagctactcaggaggctgaggcaggagaaacactcgaagccgggaggtggaagttgcagtgagccgagatcttgccactgcactccagtctggacaacagagtgagactccatctcaaaagaaaaaaaaaaaaaaaggttctgcaggacagcagggggatgggattttcatagcctctggagttatcttatctatggctatcagatattgcacataatttcagagaatacaaagaaggcacactcgagatggctaaaaataggcttgttcatgctatgtttcaaacaatcaagtgtgttaaaattgcagtttggcagggattggctattgtgaatactagtgagataaacattggtgtacaaatatttctttgagcacctgctctcaacacttttggatatatatgccaaagtggaatgtctggatcatatggtaattctgtttaatcttgtttgtttgtttgagatagggtctcactctgttgtctaggctggaatgcagtgacatgatcatggattactgcagtcctcaacctactgagctcaggtaatcatcccaccttagcctctcgagtagcagggattacaagtgcatgccaccaccatgcctggctgaattaaaaaatcttttttgtaaaaatgaaatctcacaatatgcccaggctggtcttgaactcttagtctcaagaaatccctcaccctgagcctcccaaagtgctgggattacaggtgtgagccatcacatccagcatggttttgattttcattttcatgatgtttagtgatgttaagcatcttttcatgagcatcttttcctgtgtttattggccatctgtgtatcttctttggtgatattattcaagtcctttttctgtatttgaattgggttttgttgttgttactctcgggttctagaaattttaaaaataaactccagatatttgtccccagtcggatacaggacttgaaaatattttctcccatttgtagattgtcttttcattctcttgttattatgctttgatgcaaaaaatttgtattattgattaggttcaactcataatttttcttgtgttgcctgtgtggttgatgacataactaagaagtcatttccaattccaatatcatgaagctttctcacctatgttttcttctaataggttttcagctctagctcttacactacacttaggtttttgatccattttttaaaaatcatgccacattattattattattaagatggaggcttgctgtctcccaggctggagtgcagtggtgcgatctcagctcactgcaacctctacctcccaggttcaagtgattctcctgccattgcttcctgagtagctgggattacaggtgcatgccaccatgcccggctactttttgtatttctttttagtaaagacagggcttcaccatgttggtcaagctgatctcgaacacctgacctcgtgatccacccacctcggccttccaaagtgctgggattagaggcgtgagccactgtgcccggccatgccacattatttttaattatgtacaaagatctaaaatgtcactcagggaccatttcatccaccactctgtttggccaccagtcttttgtctgtctcttctgcaatagtgaggcggataccctttcctcggggaagagaaatccatggtctgttgcccttgccaataacaaaaatgttggaaaatctagtggcaaatctgttgcctttggcatccttcacgtaaaccactttgaaagatcgagggtgccgctctctgttgatcacaccaattcttcccaggttagcacttccagtcaccatacacaggttccagtgtcaatcttgatgaaatcagtaatcttgccagtctctaaatcaatctgaatggtatcattcaccttgataaggggatcagggtagcagatggcgtgagtatcaagagtcaccagatgagggattccttttgtgcccacaaagatttttctcagtttgcataacatgtacttggcctcctcaggtgtaatacgttgtacagcaaagtgacccttggtgtcacaggtcagttgggaattctctcccatcttgtcagtgttgatgacatccattaatccagcagggtaggttatatcagttcggaccttgccatcgatcttaaccgctgtgggaaaatctttacttcaactcctgtcagggcatacttaagtctcttccttaggaaaatgatgaggggtaaacactctctcaacttgtggggactggtggatggatgaggagaaacacaccagtcaatttatccaacattcaatactttggagctgctatccccttcagatgcttcttgggaccacgagccatggctgtgttaggcaaggaaagagttaatgatttttcatctttttttttttttttttttgagacggagtttcgctcttgttgcccaggctggagtgcaatggcgtgatcccagctcactgcaacctctgcctccccggttcaagcaattcttctgcctcagcctcccaagtagctgagattacaggtgcccaccaccacacccggctaatttttgtatttttagtagaggcggggtctcaccgtattggccaggctggtctcaaactcctgaccttgtgattcccctgcctcagtctctcaaagtgctgggattacaggtgtgaaccaccgtgcctggccttgatccattttaagttcattttatatatggtataaggttagggtctaactcccttcttatgcatgtctatatccagtttttctgctaacacttctcccccacctcccaccacaagctttattgatacctcattgacaaagaaaaactgtatatacttaaagtgtgcaatgtgatgtttagtataaacattgtgaaatgattaccactaccatactaatttatgtatccatcacttcacagtcaccttttttactgtgtcgagaacacttaaaatctgctgtcttagtaaactccaagtatacaatacagttttttgttttttgttcttttattttttttgagtcggagtctttctctctcaccaggctggagtgcagtggtgtgatcttggtttactgcaacttctgcctcccagattcaagcgattctccttcctcagcctcccaagtagctgtgattacaggtgcacaccaccatgctgggctaattttttgtatttttagtagagacggggtttcaccatgttggccaggaaggtcttgatctcttgacctcttgatccccccacctctgcttcccaaagtgctgggattacaggcgtgagccaccacacccagctggacaatacagtattgttaactaaaatctccatgctgtacattaaattcctgaatttcttcatcttgtaattgaaagtttataccctttgactaatgtctctccagtctctccccattctcccagtccctggcaaccaaaattctccacttttttttttcttcagatggagtatcactctgtgcccaggctggagtgcagtggcaggatcttggctcactgcagcctccgcctcctggcttcaaaggattcttgtgcctcagcctcctgagtacctgggattacaggcgcccacgaccacgcccggctaatttttgtatttttagaagagatggagctttaccatgttggccaggctggtctcgaactcctgacctcgtgatccacctacctcagcctcccaaagtgctgggattacaggcgtgagccaccgcgcccagccagcattctcctctttgcttctgtgagtcaaggactatgtggctatgttacagcccacatatatgtgagattatacaagatttccttctctttttaaggctaaataatattcacatatataatcacattttcttcatttctaaatgtccaggaacatttaggttgtttccatacttgtctattatgaagaaggctgcaatgaacgtgggaatgcagatatctcttcaagatattcacgtcatttcctatggaaatatacacagtagtgggattcctggatcatgatggtattgttaatggaaaggcgtctggatccagaccccaagagagggttcttggatcttacacaagaaagaatttggggagttcataaagtgaaagcaagtttattagagaagtaaagaaacaaaagaatggctactccataggcagagcagtggtatgcactgctctattgagtatacttatggttatttattgattatatgctaaataaggggtgggttgtcaataagtttttcaggaaaggggcagagattttctggaacctagcatccctctttttttttttttttttgagacggagtctcgctctgtcgcccaggctggagtgcagtggcgcgatctctgctcactgcaagctccgcctcctggattcacgccattctcctgcctcagcctcgtgagtagctggaactacaggtgccggccaccacacccagctaattttttgtatttttagtggagacggggtttcaccgtgttagcctggatggtctcgatctcctgaccttgtgatccatctgccttggcctcccacagtgctgggattacaggcgtgagtcaccgcgcccggcctacatccctccctttttagactatataggtaaacttccaaacatggccatgacatttgtaaaaagtcatggagctggcggaagtgactttttagcatgctactgcattataattaacctataatgagcagtgaggatgaccagaggtcacttttgtcaccatcttggatttggtgggatttggctgggttctttaccgcatcttgttttatcagcaagctctttatgacctgtatcttatgccgacctcctatctcttcctgcgactaagaatgcctaacctcctggaaatgcagcccagcaagaaaaaaagaaaaaagactgccttttctccattgaaggttcttggcaccatggtcaaaagccatttgattatatctgtgaaggtttatttctggtctctttatgctataacaatggtctccatgtctagttatgcctataccacattgttttgattactatagctttgtagtaccattttttctgctttttttcttgagacaggttcttgctctgttgtccaggctggagtgcaatggtgtgatcacagctcactgcagggtcgacttcctgggctcaagagatccctcctatctcagctcctgagtagctgggactacaggcatgcaccaccatgccaagctattttttatttttattttttgtagagatgaagtctccttaagttccccaagctggtctcaaactcccgggctcaagcagttttcctgactcagcctcctgaattgttggtattacaggctagtaacttttgacatcacaaagtctgaattttccaacaatccttttttttttttttttttttttttgagactaagtctcgctctgttgcccagactggagggcaatagcatgatctcagctcaccactggctaatttttgtgtttttagtagagacagggtttcaccatattggccaggctggtctcgaacttctgacgtcaaatgatctgcctgccttagcttcccagagtgctgggattacaggcttgagccaccttgccctacccaacaaacttctttttcaagattgctttcactgtgtggactccagtgagattccatatgtgtgtggtcttttgtaacccaaacttcagcagtgacttaacatgatttttgccacattctgctagtcacagagacgaagcctgctacaatgtgagaggactacacaaaggtatgagtattgagaagcagagattattgggggacaatttggaggctggatactacagagaaggaattggcaatacccaaaaacactacctgtgcaatctggaaaccgttttcttttttttttttttttaattttgaggcagagtatccctctgttgcccaggctggagtgcagtggcacgatctcaactcactgcaacctccatttcctgggttcaagtgattcttgtgcctatctccctagtaactgggactacaggaatacaccaccacacttggctaattttttttaatttttagtaaagacagggtttggccatgttgcccagcctggtctcaaacttctgagctcaggcaatccacccccttgccctcccaaagtgttgtgattacaagtgtgagccaccgtgcacggactttttcttttccctttttttttttttttttttttgagagagttttgctgtgtcccccaggctggaatgtgcagtggtgcaatctgggctacctgcagcctccacctcccaggttcacgcgatgctcccacctcaacctccagagtagctggggactacaggcatgagccaccacacccagctaatttttgtatattttttagagatgggctcaccattttactcaggctggtctcgaactaaggagctcaaagtgctggggttacaggcatgggcaactgtgcctggccttgcaatcctactttttttttttttttgagatggagtttcactgttgttgcccaggctggagtgcaatggcatgatcttggctcatcccaacctccacttcctgggttcaagtgattctcctgcctcagcctcctgagtagctgggattacaggtgtgtcaccacaccctgctaattttttgtatttttagtagagacggggtttcaccatgttggtcatgctgttctcgaacccctgacctcaagtgatctacccacctcggcctcccaaagtattgggattacaggcatgagccaccgtgcccagccacaatgctacttttaagaatttttttttatactaagtccaggattcagtctaaacttctaagaatttgccttaaaggtaaacctttaacaattcaaataagttcaacagtattaattgcagcactgtttgtaatttcaatttgaatgcctaaatgctctcaagtattagagtatctgaatatatggtacatcaaccagtggagtatcctgcagctctagaaatgaatgaagatctctatgaactcacattaagtgatttccaagatacatggttaactaaaaacacaaactccatctcaaaaaataaaattttgtgtttttaacctcatttatttaaaattaaatgaatttgtaagccatttgttctgtggtattctgttatggttgcctgagctgattaaggcagattttggcactgagaagtgaggcactggaattaaaaacaaacaaacaaataaaaaaactaaaaatgtgaagcagctttgaaactgacaaatgagtagaggctggaaaaattctgatttgcaagctggaaataatagtaagggtgattctggtgaggtgtcattggggaatgaggaacatgctattgggaaatgaagaaaagacaaccctttatatgaagtggtgaagaacttagcaaaactgtattctagcattttgtggaaggtagagcttgagagagataaaactgggtatgtatcactaagatctgtaattaaagtgttaaaggacacaggaagcttcattcttcctgactgcttatagtaaaatgcaaaagaggagacctgaattgcagaagaaattgttaaagaaaaaggaaccagaacctggagatttggaaaattctcagcctatccataatgcaaaaattagaaaacttgtactgaagagaatcctgaaagtgtggctgaacaatcatttgacaaagagatcatgagtgggattcatggactatatcagccatcttaacagacgtgagcacaaagactggattatactagaagagacacttccacttaggttgtgccacctaaaatggacagagaagacagaacaggtaaggctgtcacatatcatagattttacaagaaggggacacagaaataatcagctgtgaaagtgcactggcagttaaggatggtttcatacctgccatgctctgcaggatccgtgggaacagaagagacccttagaggagcatcttttaacaacccacctctggggcctacatcatcttggcttctgggaaattttgacatgaatgtgccacactggcagctactaacaggggctgggaccaatctagatgacttatctcatacagaaattcttaatgctatgatcttagaaacctaatcaccaaggtaaggtagcctgcagtactgacctcaccatccattacccttcttcacagatgcccagactcaggcaaccatgatgttgtattcagaacctgtaggtttaatttcagacccttgtgatggcacccaaggccaattcatgagccattacaacctccaaaaggcatttaggacaaatctgaatatctttagtgtcactgccactaattaaagatggcaaccaatgagctaaatggtaacattcatacccttatattcatagggttcctccccagtgtgaattctttcatgtctacttaggtgtgaggaaacagcaaaagctttcccacattctttacatatgagggctttctctctggtatgagtttgcaggtgaacattaaggggtgaggaatatagaaatgctttcccacatatcttgcatacaaagggcctttcttcatggtgagttttcaaatgtttactacgataggaagaagtaatgaaggtcttcccacattcaacacatccataaggcttctctcctgtgtgaattattttatgttgagtaagggttgaggatccattgaaggctttcccacattccttacactgatagtgtttctctccagtgtgatttcgtatgtgtatagcaaggcccgtgtactgagtgaaggcttggccacattccttacattcatagggttttattccagtgtgagttcttacatgttgagtaaggtgagttgacctagtgaaggctttcccacattccgtatatttgtgtggttttattccagtgtgaatttgaatgtgaacattaaaggatgaggaatttctaaaggatcttccacattctttacattcaaaggacttctctcctttatgaattttcacatgtgcagaaagttgagaaaaattagtgaaggatttcccatgtttcttagtctttttagatttctttccagtatgaactgttacacactgctttaggtgtgaggaatgagtgatggctctcctacattcctgaaattcacagaatttctctccaatgtggattcccatgtgattatcaaggcttgcaaaatacttaaagccttttctacattccttacatttgtatggttgtcttgcattgagaattccaagatgtgcagcaagatctggagttaaggtgaagacttttccacatggattaaatttggaaagttcctgtccaatagaggcttccttgtgcacactgaggatgtcttttccataacaattaccctcaaagatgttccctccattctgagctctcatgtgtgttttaaggcaaaaccattcactgaagacctctccacaattctcagagtttccatccactgtagcttcttgtctgctgatgaagggataaaggatttaaaatgttttcagacatattaagagatttcacccatctgaacacagaaacattattttggtgacaattatcattttactttttaatgtttaatttttttttcatttcctaccctcttgatttcttccagattgaatgatgggatcttttgctagaattttatgccactggctctaattactcaaaaaaaaaacaactgtttttaattgttgggggtggtttgagacagggtctcactctgtcacccaggctggtaccatggcagaatcacagctcactgcggccttaatctcccaggctcaagtcatcatcctgcctcagtgccccaaggagcttcgactacagttgcatggcaacacacccagctaaatttttattttttgtagagacagggtctccctgttgcccaggctggtcttgaactcctagactcaagtggttctcctgcctcagcttcccaagctgctgggattacaggcatcagccattgtacccagcaaaatagtgtagattttcatgaaactgttccaatcctcaatgtctagttacatatgtgggaatatgtacttgtcggtattttgcagtgacaagttatataggtatggaacatcacaaaattcatcacattcagactatctctccagagactttgctccctcaatggtgcaggctacttctctaattctcttaagtatctctcatttgtgctgtttctttttcattgcacactccacctcccaggtttaagcaattctgcctcagcctcccaagtaactgggattacaggtgcccaccaccatgcctggctaattttgtatttttagtagagatagaggctagtctcaaagtgctaacctcaagtgatccacccaccttggcatcccaaagtgctgggattacagactcagtttattttccttctttctttctttcttttttttgtgagatgaggtctcactccatcgcccaggctggaatgaagtggtgcaatcttggctcgctcagtaacctccacctctgggttcaagtgattttcctgccacagcctcccaagtaactggtatgacaggtgcccaccactacacttggttaattttgtatttttagtacagacggagtttcaccatgttggccaggctagttttaaacccctgacctcaagtgaccacctacctcaacctcccatagtgttgggattacaggcatgagccaccacatccagcctctttttaaaatcagagatgggatcttgctatattgtctaggctggtcttaaactactggacttaaatgatcctcctacctcagcctccctagtagctgggattacagaagtaagccatagttctgaccgtgctgatttcctagaatggaattctcaatcttttctgagaggaaactaagaaatatcactcatcctgccatttgtatcccattgaatattggattcctcaaaaaaccaagctgaagtgatgaccatttggttctaggttgtatttcccattctgaagttaagcagaaaaagaaatgtaaggatttatagaagaaatgtttaaaacgatgagtcatttgtacttgttttctaattaaacacagtaataaaagataggccagagaactttgaggattttgatatgtcaaaaatttggctataaggacgtggggtttattacacaattgatgtgtttagatagtttattacaaactgcttctgtgaaaaatgaaacaatagggaagaggaagagaagattatcaggaaaggaaagtaggaaagattgggataaagagcatgtatcaaaatgataaagttaacaaaaaaaagaacaggtagttttgttaggtcataggaatgtttgactagatggaaaataaaagtcagagatatctgaaattctgagaaaaatagcttaaatcttctgaggtaaagtggatctttaaaaatattttttttatttttttgagatggagtctcactctgtcacccaggctggagtgcagtgatgcagtcttggctcactgcaacctctgcctcccgggttcaagtgattctactgcctcagcctcccgagtgcctgggactacagggatgtgccaatatacccagcaaattttctgcatttttattagagacggggtttcactgtgttagccagtctggtcttgatttcctgacctcatgatctgcccaccttggcatcccaaagtgctgggattaaaggcgtgagccaccaagcccggcctagtctttatttttatgattttttttttagagatgcggtctcacaatactgtccatgctaatatcaaactcccacactcaagcacttctcccacctcagcctcccaagtatctgggactacaggtgcagggcaccatgccaagcaaaatgatgttactcttacccacagaggccaggttcacatagttctccaacatcacatctctgtagaggcatttctcagttgtgtccagtaaagcccactcctctggggtgaactccacagccacatcatcaaacgtcactgaatcctaagtcatcacacacatgccggtttgagccaatgaacactgccatgaatgttcactggagaatgaggaaggggaaacttatactcacttatatgtggttctgagctctcccaagatctactccagtgtttaatgtctcaggagctcttgtgtctaagcaatcaaggtgaacctactagaggcatatgccttgaacagcactttaaaaatttttttaattctttttttgtttgatctatttttaatttttaaatacttttatttttaaattttaaatttttattttgatgagaacagtacttcctaagcatgaatttttacctatcatctatctatctatctatctatctatctatctatctatctatctatctatctatctaatctgtttatttatttctatataaagacagggtcccactgtgtcacacaggcacaatcgctgcttactgcaccttcgatctcctgggctgaagttcccctcccaccccagcctcctgagtagctggaattacaggcatgagccactgcacactgcttacactttatctcagcacaaccagtttaggagctcttcctgtcccattggtgtctatgccgcacactcctcagcacactgcagatacctgataaatgctgataagtgaataatttgataaaaggacactttcatcagctttatcatctgtcactgcacccagcaatgtaagaaagatgcagttggcaccatgaaggtcaagcttaagtagtaattactgagctactggactgattttcaagttaacactttatgtataggaaacttcattccctggggaaattcatctggggactcagtctttgagtaaggcttcatttgctctaagaaaactctggagatgagtctgtctagaaggaaatatgtctacctattggatgtaagcatgtcattttgtacaatggcacattttctttttacctgataagaatttgccaggtagtcctccaccatcgttcctatctttgtcttttcttcaaaagggcagattggttccctgggaaaaaaccctagtggaaaagtaagaaggcatgagaagccaaagctgcccacagtctcatgcccagaagtcattccatcctagcttgaaattcccatatgctcctgcacactcgagaaaactacacacacacaacactttcatgaaatgccatagtagtcctgtgtcacctagactcagataagcagacatgggccaaactgcctgttgggtaaagggatatagcttcatttttcaaggaaacttacaccctgaaaaatgtgactatctatctacccatagtagtaacactcatgaagcttatgtagcatttcctaagacacacaaaccagggctgaattctaaaacagcattctgactgggcacagaggctcatgcctgtaatcccaatattttgggaggccaaggtgggcaaatcacttgaggtcaggtgttgaagaccagcctgaccaacatggcaaaacctcgtctctactaaaaaaataaaaaataaataaaaaaatacaggagactgaggtaaagaattgcttgaaccagggaagcagaggttgcagtgagtcaagattgtgccactgcactacagcctgggtaacagagggaggctccatttaacaaacaaacaatattagccaagcctggtgatatgtgcttgtggtcccatctgcatgggagactgaggcaagagaatcactttaacccaaaaggtggaggttgcagtgaactgagattgcaccactgcactccagcctgggtgagagagcaagattctgtctacaataaataaataaaacaaaacaaaacaaaacaaaatagtattctacatcttacttcaattcctcctaaaagaaccagtggtggctcatgcctgtaatcccaacactttggcaggccaaggcaagcaaatcacttgtggtcgggagttcaagttcagcctgacaaacactgagaaacccgtctctactaaaaatacaaaattagcctgtaatcccagcgactcgggaggctgaggcaggagaatcgcttgaacccaggaggcagaggttgcggtgagccgagattgcaccattgcactctagcctgggcaacaagagtgaaactccatcttgaaaaaacaacagaacaaaacaaaagaaaaaaacagtggcatgcctgctcaggcccagcgcactggactcttatgttgtggaggacgacctaaatcagaatctctgaaaaagagcatcaacaaggacttaccatgggacaaatcagtgactgccattctctgaagctgatggtcagttgtgcctcaatgctctcttccttgatgccaagattgcctcagggcaacttatgaatctaggtgaatagaggcaatctccattcctctttgtacagggttatttgaagtcctgtttgtatcaagcatcaaacatcagtcatcgaacattatgcatgagctttctcgctgcaggtgacaaatgtgaaggccaccaaaaactgtacactcagtatcgtcactcagtaatgatagtattaataacagcaactgacatttactgaggcctagtatgtcagaagtagctctactagctatatacatgctcacttaattatcataaccatccttcccaatagctatcattacctctatctgtctatctatctatgtatctatgtatctatgtatctatgtatctatgtatttatgtatctatctatccatccatccagacagggtctcactctgttgcccaggttgaagtgcaatggcactaacacagccctctgtagcctagacctcccaggctcaagtgatcctcccacctcagtctcctgaataggtgggcccacaggtgtgcatcaccacaccttattatcattattattatcattattattactattattattatgagacagagtctcactctcccacccaggctggagtgcagtggcacgatctcgactctgtaacctctgcctcccaggttcaagtgattgtcaggcctcagcctcctgagtagctgggattacaggtatgcaccatgcctggctaatttttgtatttttagtagagatggtgtttcgccatatcagccaggttggtctcaaactcctggcctcaagtgattctcccacttcagcccccaaagtggctaggaatacaggtgcacaccactgtgtggggaaaagaaatagagaccagatttttactgtgtctatgtagaaaaggaagacataagaaactccattttgatctgtactaagaaatattgtttctgctttgagatgctgttaacctgtaactttagccctgaccctgtgctcacagaaacatgtgctgtaatgaatcaaagtttaattgatttagggctgtgcaggatgtgccttgttaacaatatgtttgcaggcagtatgcttggtaaaagtcatcaccattctccattcttgattaaccagggacaaaatgcactgcggaaagccgcaaggacctctgcccatgaaagcctgagtattgtccaaggtttccccccactgaaacagcctgagatatggcctcatgggaaaggaaagaccttaccatctcccagcccaacacccgtaaagggtgttgcgggaagtcaaggaccccaaacggagggaccggctgaagccatgacagaagaacgtggattgtgaagattttatggacatttattagttccccaaattaatacttttgtaatttcttatgcctgtctttactgcaatctctaaacataaattgtaaagatttcatggacacttatcacttccccaatcaatacccttgtgatttcctatgcctgtctttactttagtctcttaatcttgtcagttgaggaggatgtatatcattccaggaccctgtaataatcgcgttaactacaaaaattctacagcatatgtgtttgagcaatatgaaatgtgggcacgctgaaaaaagaacaggataagagcaattgttcagggaataagagagataaccttaaactctgaccgctggtgagccaggcagaacagagccctatttctcttctttcaaaagcaaatgggagaaatatcactgaattccttttctcagcatggaacatccctgagaaagagaatgcacacctaggggtaggtctctgaactggcccaagcccccccgggggcgtacctgtctcttatggtcgagattgcagaggtgaaataaactccagtctcccatagcgctcccaggcttattaggaagaggaaattcccacctaataaattttggtcagaccggttgatctcaaaacctgtctcctggtaagatgttatcaatgacagtggtgcccgaaacttcattagcaattttaatttcacctcggtcctgtgatctcgccctgcctccacttgccttgtgatattctattaccctgttaagtacttgatgtctgtcacccacacctattcgcacactccctccccttttgaaaatccctaataaaaacttgctggtttttgtggcttgtggggcatcacggatcctaccaacatgtgatgtctcccccggacacccagctttaaaatttctctcttttgtactctgtccctttatttctcaagccagccgacgcttaggaaaatagaaaagaacctacgtgattatcggggcaggtcccccaataaaggggtctgtgctgaggagtagtgaaagagggaggcctctttgcagttaagaggaaggcttctgtctcctgccaatccctgggaatggaatgtctcggtgtaaagctgaccattcccattcattctattctgataggagaaaaccaccctgcagctggaggtgagatatgctggcagcaatactgctctgttactctttgctacactgggatgtctgggtaaagagaaacataaatctagcctatgtgcacatccaggcacagtacctttccttgaacttattcatgatacagattcctttgctcacatatttccctgctgaccttctccccacctgttgccctgctacacttccctcgctaagatagtaaaaataataatcaataaatactgagggaactcagagtctggcgccggtgcatgtcctccttatgctgagcaccaatcccctgggcccactgttctttctctatactttgtctctgtgtgttatttcttttctcagtctctcgtcccacctgatgagaaatacccacgggtgtggaggggctggcccccttcaccactaggtctaattttttgtatttttagtagagacaaggtttcaccaggttgcccaggctggtctcaaacccctgggctcaaacaatcctcctgccttgacctcccaaagtgctgggataataagcatgagccaccgcgcctggctcattacctctatttaatactgaaaaaatcctacattcaaataaccctaataattagtctgatatttgtccttagagcctgatctcctgtggatgctgttaccccctaatatgaccaggaggcagtccagacctgcacagaacacttaagtagtcaccagccacgtgtgttattgctaacttcactatgtacctaagatgactgaagaacagaatttaaaatattcaaaagatggccaggcgcggtggctcacacctgtaatccctgcactttgggaggctgaggcaggcagatcacctgaggtcaggagctcgagaccagccttggcaaacatggcaaaatgccatctctatggcaaaacgccatctctatggcaaaaccctgtttcaccatgttggcgaggctggtctcaaactcctgacctcaggtgatccacctgccttggcctcccaaagtgttgggattacagatgtgagccagggtgtctggcatgcccttcttaagtagaaaggcttgtagctggtaacaactagaaaacaaataacgtccaagaaaataaaaatttaaaaaaacgaaaggcctacagtctacacgtgttcttatttacatacagaaatagacacaccctaaacaactatgttttttccatccaaatgtaatgtgtcaaaaataagcaaaggacaccaaggcaatgccagattctcagatgagacattttttagcaaatatatggaagtcagagccctcttgaaaccaatttaacaccggtgctcaccaagaacactccggaatcgccaggttcctgacgcgggaggatgcggggccagagccaaccttaccagaatggcagaaatccttttcctttcggaaagaaaaaaattcaccaaggttgctttagaagcttttgaagaggggagcacagcggatgaaagcactccagaaaacatcccatggacgcgggataaacacacttcctgacgcggctcctgacgtggaccgactgaacctgcagctgggaactggccacgctgggaggaccaacaacccctggagaagctagtgaaatgagcaggatcagagaggctcctgggcgagcgcacccaatccttcctttggcatcccccgcctgtctccaggacccccaagcaggggcggaactcaccacagccggggtcgactccaccaagataaaggtgaaacagcactgaccgtgggcagccagcgcgggaaaagatagtggcggcgggctgatgtcacttccgctacgagcttcgggaaggacggggcttctgggatccagtttcagccacgtaggaccaggttgttagaaatgcttgttccccggtgcataaagaaatagcacttgaacataaatttaatttcctcagtaagcccattttacttttggcagaacaggtacactagccagcagttttgccactagagtacactaaacaaaggaaacagggtcatttataacctgacgtgtccaccctactgcagcgtccggtttccattggctggaatggaacatcacattctgtatttgacccggttggctaccaagtcagaactttttaaaagaagcaaaggcagaggagaacaaaggaaggaggaaataacttgtggaatgctgagaaagctaaaaacaccttcaaataaggaagaggaacaggctatgacctaatgcttgcttggaccagtataagcatgccagggcaaatatttaggctaaattgtgagagctaagaacataaagtacattgatttctttattacacctcacagatacttaagaatgttagcacaggtctttgaatgcatttcgctcctaagaagagttactatttatttctaattagatggagagtaaagtctctttgaagaggaacctctacttttcagggtcgaacacagaaattctagtttcctcctgggtgggtgcagacagggcctgggttggctcagagagtgggatgcagaaacaggttcagagaaaaggtgaggttacaaccacgcctctggatggaactgtgggtagagggttggggcccgtacttggaggtggcttagaggttggacccggcctagcccctgctacaggtggacagatgggctggaaaggctgggataggggatgggacacaccccagggaatgctcctccaaagcttttccccagtgggcgcagtttcgttcttgttgcccaggccggcacctggctcgaccccgtctctattaaaatatatatatacatatatatacacacatatatatacatatatgtgtatatatacgtatatacgcatatatacacatacgtgtatatatacgtatatacgcatatatacacatacgtgtatatatacgtatatacgtatatatacacatacgtgtatatatacgtatatacgtatatatacacatatatacgtgtatatatacacgtatatacgtgtacgtatatatacacgtatatacgtgtatatatacgtatatatacacgtatatacgtgtatatatacacgtatatatgtatatatacacatatatatacgtgtatatatatgtgtatatatatatagccgggcgtggtggctcatgcctgtaaaaaataaaataaaatatatatatgtgtgtgtgtatctacataaaacttttttgtttgcctctcctcatgttcctagagcctttccatgattcttccacattgacaaagatgccagtgaatggcatggtctatctcttccattcagtcaggctttctgtaggcctttgtttcttcattctttatttcttagaacctgctgattccattgcattttcctttttttttttttttgagacagagtctcactctgtcacttagagaagagagacagaccctctcatattgttttatattgttttatactcagaaaaagaaagaaaagcaaaactaaaggcaggtagcccagcacctaggaaccagatctgaaaccaggcctgggcctgcctgacctaagcctggtaattaaagatccacccctgacctaaccggttatgttatctatagattccacacattgtatggaaaggcattgtaaaacttcccggtctgttctgtttcactctgaccacaggtgcatacaacccctatcacatacctgctccttgctcaatcaatcatgaccctctcacgtggacccccttagagttgtgagcccttaaaagacacaggaattgctcactcagggagcttgactcttgagacaggagtcctgccaatgctcccggttgaataaacctcttccttctttaactcggtgtctgaggagttttgtctgcgccttgtcctgctacatttcttggttccctgactgggaagtgaggtgattggtggatggttgaggcagctccttaggtggcttaagcctgccctgtggaacatccctgagggggaccacgaccagcccgagcaatgcagatcctgagagtactcccaggtaggcatttgccctggtgggacaccttgccagagcagtgtgtggcaggcccccatggaggatcaatgcagtggctgagcacctggaaggaacgggcacctagagtcttgacatctaaaacttggtaagactagtctttggaacttgccactccgttttagtggaagtgtggcctgatcacccacggtgtgcctttatcagcactttggttttggttttggttttggttttgacttggtttgaattgcttgacaggaccagtcttgggaacatgcccactccatttgagtggaagcatggcctgatcacccatagcgtgcctttattggcactttagttttggttttgacttggtttgaattgcttgacaggactggtcttgggaacttgcctactccatttgagtagaagcgtggcctgatcacccacggtgtgcctgtactggcactttggtttttgtttttgacttggattgcttgatactttggttttggttttgacctggcttggatttctggatagtctgattttggttttgattttggtttagtgtaaactacaaaggtgtgtgtgtgtgcccttttaacccgttctttgttttgtggtgtgcatgtggtgtgagcgtggtgttttgtctcgaggaaacaggggtgaggcaaaagtaagcccacctcactaggaactatgttgaaaaattaaaaaaaaaaaaaaggagatttaaaggagactatggagtactatgacaccaggaaaacttaaaactttgtgtaagatagaccggccagcattagaagtaggttgaccattagaaggaagcctggacaggtcccttgtttcaaaggtatggcacaaggtaacctgtaagccaggacacacagaccagctcccgtacatagacacttggttacagctggttttagagtcccttcccccaacacagaatggttgagagaaaagcagcataggtggctatcagaggcaaggaaagactagcagagagagagaaaggaaagatacagagaggaaaagaggcaaagacagagagaaagagacagagaggaagagacagacaaagagggagtcaaggagagagagagagagaaagaaagagagaggcagagagagagaggaagagacagaggcaaaaggaaagtcagagagagacaaaatcaaagacagaaaaaaagagagaaagagatagacaagtagttaagaaaaaaaaagccgtctatacaaattctaagttaatttggacaaaacaaggtcttattaatagcaaaggataattaaaatcccaaacttacaaggttttcaacaaaagtaaagtttgctaaaagttaacagcgtaacatgtattatagtaacttctattcttgtggccttagacagtctagtccacagacataaaaaaaaaggttcactttggaagagaatggttatcatcttcaaaaaaaagagttataaaaaaagtgtgttaaaaaagaatttatgcaagaaatgttgtataatttaaaagtaattagtcctcctaaatgtaaaactattgaagagacagtttatgtgcaaggtgtataaggaaagtaaagtatatctttggtaaaaggattataaggaggcataagaatgtggatttttacctacattaaaaggttaaaaatatgtatattttgttttaaaggtttaagcaagttttgaaacgttaattgggtgtaaattctgtgggtaaatatattagctaaaattaaaggggtatcatccagtttctctgtatactggatattaaaataaaagcataacaggtttttcttaaagcaccaacctgctctttagcaaaaattttaaaaggttaaaaagagtctataaaatcttaccttatggtcaaacattaaaaattagataaatatgtctacaagtttttattaaaattaagtttaacattaataacacactaatataaagataaaatttagcttatctggtataaaaataataaaagaagcattattaaatataaaatggtgtttagcttcctttggtctaaaaaccaataaaaataggtgctaaaggaaatttctcagtaaaaaggcactaaggactataaagtccactgccaaggtccccacatttaaaacaaaaggtcaatttcttagaaattatatacttgatttatcttccacttccctttccctcaaaactaaaagtcttttagcacatgtaccacccctagaatttccggtcaaccagcaccaggctgaagatcatgttctcattgaaaggtggaaagaagaaaacctcgagccagcctgtgaaggacccttccttgtgctgctaaccaccaagactgctgtttgtacaccaaaaaggatggactcatcacacccgagtcaagaaagcgccaccctctccagagtcatgggccataatcccagaagaaaaccctaccaaactaaagctaagaaaaatttaactgtttttcatctattctattactctttcttctttccgcactctattgatgaccatctagttattaacataaccaagtcaatttcacctcaaactattgcatttaatacttgccttgttataccctgtggggacttgccaagtcaaagacagctctctacttctgaaaagtacttctgtccctcctgactctcctcagactgggcattagtaaactaggaccatttaatttggggagatttcgataaagaccccagtgacaaccaagagtcttgcccccacaatgtagagctttcatgccatagttggtccaacgttctgtggaccactaaagagcaaggatgactgccccaaccggtttttgtaatttcctaaaaccatacaatcattttactagaggatcatagaagttaaagacttaaaacaaactttagcaattaagacaggataccaagatgtaaatgcctggttaaaatggatcaaatattccatctgcatgttaaacaaaagcaattgttatgcttgtgcacatggcaggccagaggcccagattgtccctctttcactaaggtggtcctccagtcaaccaggcccaggctgcatggtagctgttttccaggattctacagcctggagtaataagtcatgccaagctctctctgctatattccgaagtctggtaccctgtgggttagcccccaggagatatccagcttccgtctcccaacactaaggtcacttcctgtctctcacgacagggaggaaacttagcattccttagagacctgaagggatgcgatgagcttaagaattttcaagagattatcaatcaatcagcccttgttcatccctgagcggatgtgtggtggtattgtggtggacctatactgggcactctgccaaataactagagcggcacttgtgctttagtccatttggctatccctttcaacctggcatttcatcaactagagggagaaaaataagacatcctaaattaagagaagccccttatgggtctttcaactatcacatctatttagatgcaattggaggcctgcaaggaataccagatcaatttaaagcttgaaatcaaatatctagaggatttaagtcaatattttagttggtgacagttaataaaaatttagattaaataaactacatctattacaaccaacagcaacgagcttttcatgagttaaaagaaaaactcaggtcggccccagccctggggctacctgacctgacaaaagtttttacacagtatgagtcaaaaaaaaaaaaaaaaaaaaaaaaaaaggcagttggagttttaacccagactgtggggccctggccaaggccagtggcctatctctcaaaacaactagacagggtttccaaagcctggcccccatgtctaaaggccctggcagcaatggccctgttagcacaagaagcagataagctaactcttaggcaaaacctaaacataaaatccccccatgctgtggtgactttaacgaataccaaaggacatcattagctaacgaatgctagtctaactagataccaaagcttgctctgtgaaaatccccgcataaccattgaagtttacaacaccctaaaccctgccaccttgctcttggtatcagagagcccagttgaacataactgtgtagaggtattggactcagtttattctagtgggcccaacctccaagaccatccttaaacatcagtagactgggagctgtacgtggactggagtagcttcaccaaccctttcaaagtgactctgaagaagacgacaagagttgctccagtcacacccggaagctgactggtccacgcacagctgaagcatgagaaaactcatcatgggactcattttccttaaattttggacttgtacagtaaagatttcaactgaccttcctcagactgagggctgttcccagtgtatacatcaagtcactaaagtaggacaaaaggttgctacgttcctattattttacggttattataagtgtactgaaactctaaaaaagaacttatttgtataatgttattctatacaaagtatgtagcccaggaaatgaccaacctgatgtgtgttatgacccatctgagcctcccatgaccacagtttttaaaataagagtaagaactgaggactggtgggtgctcataaacgatacgagtaaaatgttagccacaaaaaaaaaagaggtgcctgaacgagtcaccttgaaattcgacgcctgtgctgtcattaatagtaataagttaaaaataggatgtggttctcttaattaagaaagaggctatatgacagaaaataagtatgtttatcataaattaagactgtgtaaaaataaatgtagatactggtcttgtgtcatttaggctacttggataaaaaatgaaaaaatgcagtccaccttcaccaagggaaaagtggccattcctgtaccagtggtccgtataaccccttagaactagtaataacaaacccctttaatcctcgctagaaaaaaggggaatgtgtaaccctagaaattgatggagctggactggatcttcaagtaaatatcgtggtttgaggaaaagtttataaaccctctcctgagccagtatttcaaaccttctatgatgaactgaatgtgccagtaccagaaattccaggaaaaacaagaaatttgtttttgcaattagccgagcatatagcccagtctctcaatgtcccttcatgttatgtattagcacaagtgtactgtatgaatcattatcaatctattgcacaggaagacataagtagcaaaaataagagtgagaattcccactaataaaaagtgagagtctcaaagccgggaaatgagagaagacagaccctctcatattgttttatgttgttttatactcagaaaaagaaagaaaagcaaaactaaaggcaggtagcctggtgcctaggaaccagaccctaaaccaggcctaagcctggtagttaaagatcgacccttgacctaaccagttatgttatctatggattccagacattgtatggaaaggcattgtaaaacttcccggtcggttctgtttcactctgagcaccggtgcatgcagcccctgtcacgtaccccctgcttgctcaatcgaccacgaccttctcacatggacccgcttagagttgggagcccttaaaagggacaggaattgctcactcggggagctcggctcttgagacaggagtcctgccgatgctcccggctgaataaacctcttccttctttagctccgtgtctgcggagttttgtctgtggcttgtcctgctacatcaccagggctggagtgcagtggcatgatctcagctcgctgcaacttccgcctctcgggtgcaagcgattctcctgcctcagcctcccaagtagctgggattacaggtggccaccactaagcccagataattttttgtatttttagtagagatggggtttcaccatgttggccaggctggtcttgaactcctgaccttgtgatttgcccatctcggccttccaaagtgctgggattatatatattcctgtaggagatagaagcttcaaaaaataaaaacctacagccaagccaataaaatagagcacatatctcaccacaactgcaaagacaactatgctgacattactacttttagttggtgttgtgctggaggttaaaatccattcagtaaagcaagaaaatatatatttatataacctaatgactgaaagggaaaaataagtcattacttacagattatctcactgcctatgtggaaagggaaaagagtcatattaagtactttggactgaacaatgaccccaaaattcatttgttgaagccccaaaccccaatgtgagtgtatgtcaaaataggatctttagggagtatcattaaatgaggtcgagggacacaaggggctgtggggagggagagcgagagtgagagcacgacccgtttcttggtctccatcatgtgaagacatgaggaattaggcatttacatgccaggaagagagctctcaccagaagtgggccatgctggcactctgatctcagattttcagcctccagaaacatgcgaatataaatgttaaaaacaagtagtttagatagttcctcttcaaagggtttcattttgttacaaagtgttcctctgcaagaggtctttacttccttgtactgtctgtcctgaagtcttatttccctgttgcttaaattaaccttgcccaccagtctatcagcccctcccatcctgctgtgctcaggcatgcccaccaagaagtcaccccctccctgctgtaacagccttccctgccacaactgttcttccctgtactcttcaaattagctaactgcattcagtttagactgtgtggttcaaccccaaccaataggggaatgacacatcaactaaggccaagtgcattagggattaaaaacccctgctgtcttttgtctgatgagctcttgccattgctccatccacgagacacatgcttctgtagaagtaaatttgactttctgagaaaatttatgttcgactgctatttcttttgcagcacaaatagtatgtttctaacaatttggtggcctgtacaaggaccccattctcctcccagagggttttccatcctctcctgtgaggacacatgccccactgcctcattgcagtagcctcaggggtaaggaatggagacccccctagtgtgatgaataaacccggactctcagcaacatgggaagaaaagacctacaaataccgtggtgaccagataactctgtccacagaccaaggtaagaaatgctgcaggagctggcaaagtatttcctaggtggtcatgaccaagctaagaaaagccacaggggcagtgaaatattccttggtgaggacacaccaaggcatgaaaaactgcgggggtggtgaagtattccttggaaggggtatcttggaagttaatagtgtatgaataagatgcacaattgcatgtgaaatgagtgttaagtctagatctgcagttctgtggtcacctcatatggcttagggtgacccacctgtaaaggagtccaggatgggggtttataccaacccaccaatgccaagagggacctaacatggctagagaaggatgaagtgaaagaagaggcaaaaaattcccagtaggggggattgagcctcacaggaacctccagtagcaaggaaggcaaaaaatttccattaggggaaattgagcctcaccccatattgcaagaaatttccagtaggggaaattgagacttaccccaaaaggcaagaaatctccagtaggggagattgagcctcaccctaaaaccatcaagatgggaaataccccaaacaaggtaagaaaaaggataaagctagcaacaataatattcccctgatagtcccctaggcctaatgttaaaatattagaagaataatgaaaagaccttagagaaatgataattaaaagaattagagaatctgtaccctgtatccaaaacattacaaaagctttcaatacacaacaagaaaaaaataaatgacctataaaattctgaaaaaaactcaaagagcaaatggagaaatatgcaaatctagaatagaagaccccctcagatgagggatgttaaagcttcattttgttactaatcgttggccagatattaacaaaatattacaaaaaatagagaaccagaaatacagacctatagaagagtttctttaaaaagcccaaaaaaacaccagtgcagtggctcatgcctgaaatctcagcactttgggaggccaaggcaggcagatcacccgaggtcaggagttcaagaccagcctaaccaaaatggagaaaccccatctctactaaagttacaaaattacccaggcatggtggcacttgcttgtaatcccaactacttgggaggctgaggcaggagaatcacttgaacccaggaggcagaagttgcaggagctgagatcacaccactgcactccagcccaggcaacgagtgaaactctgtctcaaaaaaaaaaaaatcccaaacagtatatgtaagaagagaaaaagaaaaacaaaagcaaaaggcaaaaatcttgctgtccaccatacaacaaagtaccaagggagccagacatataaagaacctagaccaccactgtccaggtgatataaaatgtatgaaagagtaaagccaggagactcaaaggaagaaaaaaaaaagacagaaaaattgtttcaaatgtgaaaaaataggtcactttaaaagacaatgtcccaagtgagaaagaggaagagactgagtgtgagggagagaatgctgagaccagatcggtcagggagaccctaacccagtagcgctagaagaattgaagacacacacacagaaatatagaggtgtgaagtgggaaatcaggggtctcacagccttcagagctgagagccccaaacagagatttacccacgtatttattaacagcaaaccagtcattagcattgtttctatagatgttaaattaactaaaagtatcccttatgggaaatgaagggatgggccaaattaaaggaataggttgggctagttaactgcagcagaagcatgtccttaaggcacagatcactcatgatattgtttgtggcttaagaatgcctttaagcagttttccaccctgggcgggtcaggtattccttgccctcattccggtaaacccccaaccttccagagcgggcattggggccattatgaacatgttactgtgctgcagagattttgtttatagccagttttggagccagtttatggccagattttgggaggcctgctcccaacatgtcccccttctttgatttgcagattgataaaagcaaaggagctttgtcatggtgagctacttctcataggagtcaggatctgcatctgaagactatacaaagataaataacatggattaaaagcacaatcatcattgaaattacagagcttccaagtgtttttatccattttaatgggttactagctgctaatttgtctgcagctcctttaagcaccccagttcctggcattaaggtcaggtgtgcctgggatgttttaaaatctgttcttttaattttgcaatatccaaaaacaagtctgtagagtgtccttttagatacttttttattctttccaaaattgtgatcttattaagagctattaatagtttccacaaatccttaatgtttagctcctacaatgagccatatcatttgaggttgaagtgccactatactgctatggttccagataataggaactcttgttgtacttcttatcatttctaccatctgaccattttgttcagaccagctgaacatagtgtggctggggcatgcagactgagaggtgcaattcaagctaaacatccccttaggggaccaatcaataaagattccataggaatcattgtgtagcacctctacctgttctgcaatgcaattttcctaaacaagcacattcattttttctaactgggtccaatcctgtttacaaataggtttttgagggtggtatgcctcaattataggagcagatttattatggtaaatactgagatcagaaagcatgtgtaactgggtcatagagtgattgcatccaggcattattgccagccaagattgatcaatatgcccaataagtataattgttctctgtgtcagctcttattgaaggaatactcacagcagtggtgataaccactatgatagctaccattaaattattcattgtgactggttgtcccactttcctcagtttttcttccaccatctgtgacagcttcttgatctgtccccaggtgggtggctgtgttcaacgggtgttactcgtgacagttggggtcctcctcagcatcagtcttgacatggctgcaactggggggtccttgggatcctcccggagtctcttcctcggcatctggctcatgataaggtttcaggtgtcttgatggtatccaaattggctgttgattttggcctggagaaacacaagcataacctctaccctaagttattattttacctatttcccatctttttattattggatctctccaccaaatcagttgttctgtttctgtctttgcagctggtttctgtagatgctgttcagctgctgataacatctggcctttgggcaggttcaaaaaatttaatgttaataatgttagattcagttgtatctgtgtggttccatattctccgtctccccttttctgcttttgcaactgctgttttagggagagattcattctttccactatggcttgtctttgagaattgtatgggataccagtaatgtgtttaatactccacatagagaaaaatgtagctagagattggctagtatatcctggggcattatctgttttaatagaagctggaatgcccatcaccacaaaacactgcaaaagatgatgtttcagacaggccaaacactctcctgattagcatgtagcccatataaagtgagaaaaggtgtccacacatacacatatataagctagtctcccaaacgaaggaacatgtgtgacatccatttgccaaaaagagttaggttccaatcctcaaggaataactcctcctgtaaaagatgaggaatgtaccatttggcaagttgggcatcactggataatatttttagcttctttcctggtaattctgtatctgcgtttgagaccagaggcattaacatgggttaaattgtgaaaatgtctaacattagatactgcattagcatctaggcaatcaggcttttgattcccttcagtcaaaggtcctggaagaggtgtatgagccctaatgtgactgatgtaaaaagggtgcattctacttctaactgctgtttgcaactgggtaaataaagtcatcagttgttcatctgtatgaaataataactgagcattttcaattaactgtctgcaatgaaccactatgaagaatcagaaatcacattaataggcatatcaaaagcagtcaatacctcaattactgctagaagctccgctttttgagctgaagtatagggcgtctggaaaactttactttttgagacaaaataagaagctttaccattactagacccatctgtaataacattctcagcaccttcaattggtttaaatttagttattttggggagaatccaattagttaatttcaaaaactgaaacagctttgttttaggaaaatgattatcaagaatacccacaaagtcagctaaatgggtttgacaagtaagactatttataaaagcttgctgtatttgtgccttcgtgagagggacaataacttttccaggatcatatccatgtaatttaacaatccaagttctcccaatccctatcataatagcaatttggtctaaataaggagttagagtccatgaattagtatgtagaagaaaaacccactctactaagtcctgttcttggaaaataacaccagtaggtgaatgctgagttgaaaaaattagcaaatctagagtcttctctggatctattctatttatttgagctttatggacttgtttctcaatcagttgtaactgcctcagcctcctttgttaaatgccaagggctagtgagactaggatttcctctaaggatagaaaacagattactcacggcataggtaggaatgcctagagcaggtcgtatccaattaatttcccctagtaattttcaaaagtcatttaatgtttttaattgatccctacatatggttactttctgtggcacaatgatagtgtcatttactaaggtccccaagtaggagtaaggagtagtagtagtctgaattttctcggttgctataattaaaccagtgcaagaaatcgaattttgcaagtgatcataacattggagtaatatttctcaaatggggacagcacaaactatatcatccatataatgaataatgtaacaccaaaaattttttacaagtaggttcaattgcttgcaccacgtacatctggcaaattgttggactgtttaacatgccctgtggcaacactttccaatgataatgcttagcaggctacaggttgtttactgctggaattgtaaatgcaaaccgttcacagtcttgctcagctaaagggacagtaaagaaacattcttttatatctatgactattaaagtccaattttttggaattatagcagaagaaggcaatcctggctgtaatgctcccacaggttgtataactgaattgatagttcttaagtcagttaacattctccatttacctaattttttcttaattaagaaaactgaagcattccaaggggaaaatgttggagctatgtgcccattttctaattgttcagtaactaatttctctaaagcctccagtttctctttacttagcggccattgttctatccgaattggcttatctgttaaccattttaaaggtataggttctggaggcttaacaatggccgccatcaaaaatgacatcccaatctttggcaggaactttgtctttccacttgaagtggttttttcaaaccttgcaaatttttttctagtcccataccagggacataccccatttcatgcatcatatgttgattttgagggctatataattgttctggaattagaacttgtgctccccattgttgtaataaatctcttccccataaatttataggtacataagttataattggttgaatagtcccaggttgtccatcgggcccttcacaatgcaaaatataactactttgatatacttcaggggcattaccaactccaactatgttaaattgagcaggttgaattggccacgtggatggccagtgctggagagaaatgattgaaatgtcatctcctgtgtctaccaaacctttaaatttctttccctgaatagttatttcacaggcaggacatttatcagtaatttgatttacccaataagctgctttgccttgtttatttgtgcttccaaatcctcctgttcacttaatttcacttttccccattcccacatgtggcacaatcaggggctgtggtatgcactctcctggctctgctttccagggaacagaagtagatataacaatttgaatttcccaaatgtaatctgaatcaatgactcctgtatgtatttgtatgccttttaaactttaactaggccttcctaaaagtaatcctattgtcccttctcgcaagggtccacagactcctgttgggaccttttgcaaggcttccccaggcagaaggcttacagcttttgtgcagcataaatctactgcagcactaccagctgtggcaggggacagatattgtacaggggtgagggaacggcctgagttggaaatgccccactttagaatggggcccaggacaggcccctcatggtgtttcctgaaattgggttcccatctttatcaaacttagggtgacactgattagcccaatgttttccttttttatattttggacatatttcaggatcagcagttttctttcttcccctatctggcaggctgactcgctgattttttctacattcttttttagtatgaccatgcttcccacagttaaaacaagctccaggaaatggaatatttcctttatccactctcagtcctgccattgcctgtgccaacaaagtagctttatgcagattacctccgataccatcacaggacttgatataatcaactaaatgtgctttcctgaatttaaaaggaaaaggctcaaatgtagctataatatttccctgttgatctagggggtgtattctaacagggaactgccaagcctctaaatcacccctcgtctagcttgctgaattcctgcctgagctcaaacagtcactggggcaactacttttcacccagtgtcctccggaaaagaaagatctggagggtctttttcttcaaaataataatgacggggtgcagaagggtagagatgaacctctccctcctttgctgctttagctttagctggcaaataaacctgctctgtaacctcttctgttactttgttatactctagttcctcatcatcatcagcgtgaaaaagctccaaggtgaaacgaaccagaccccacacctgtcccattgttaccctgatgcttccaagctccccttcttactcaccatggggattgctttaagagtgctcgggtgtcctccagctagttttccattccaaccatcgctctggtgacacttcaacctggattcaaacccccacgatggacaccacttgccgaaaccagcccagtcagggagaccctaacccagtggtgctagaggaattaaagacacacacacagaaatatagaggtgtgaagtgggaaatcaggggtctcacagccttcagagctgagagccccaaacagagatttacccacgtatttattaacagcaaaccagtcattagcattatctctatacatgttaaattaactaaaagtatcccttatgggaaatgaagagatgggctgaattaaaggaataggttgggctagttaactgcagcagaagcatgtccttaaggcacagatcgctcatgctattgtttgtggcttaagaatgcctttaagccattttccgccctgagcaggccaggtgttccttgtcctcattccggtaaacccacaaccttccagcgtgggcattagggccattatgaacatgttacagtgctgcagaggttttgtttatggccagttttagggccagtttatggccacattttgaggggcctgctcccaacagagaagaaacaggggatgacagagagagagaaaaaaagagagattgcaaatgagatagagacttaaaaaaaaaccctatgagtctaaaaataaaaaatgtagagagaaacaaaaaaattagagacagagatagaaggagagaatgagtgagaaagagactaaacgagacagagatcagagagggacacagaaagtgagactaaggagagaaatagtgtagaagagagaggaggccaggagcagtggctcacacctgtaatcccagcactttgggaggctgaggcaggtggatcacgaggtcaagagatcgagactatcctggccaacatggtgaaaccctgtctctactaaaaatacaaaaaattatctgggcatggtggcaagcgcctataatcccagctacctgggaggcagaggcaggagaatcgcttgaacccaggaggcagaggttgcagcaagctgagatcacaccattacactccagcctgggcagaaagagcgaaattccatctcaaaaaaaaaaaattgcaaaaataaaaaaagaggaaaagacaggagacaaagagacaaaaagtgagtgagcaggtgaggagagagattgagaactatgagagacagcaactagtagaaaaaggaggcaggagactgcttgggtgccacagcacccacaccatcctcttgcccctgtcatttggacccaatagctgacccttgatagaggagagcagacctcgcagcagcctgagcctgggcagccgtgcctccaccatctccccactcagcagcctaagtcccaagctatatgtgatgcaactctcagagtctatggatgtgtaaaaatgtatactctggcaaacaacttacagatagttacctaatatatacatacatacatacatacatacatacatatatgtgtgtgtgtgtgtgtgtgtgtgtgtgtgtatatatatacactaataagcaaactctaagaaagtcaccccttggaggaagggagccaggattaaggccgttctaaagtgtccaaactgattacaccaaaatggccccaaattggttgcctaaagtacctactagtaatgtaaatcaccttactcactaggtagaggctattctcttttcaagtgcaacagccagtaatgtagttaaagcattaattgaaaacattatacccaagtttagattaatagaaaatattgattcagaaaataagacttatttcactgcacatgccgttaaaaaattagcccaagtactaatcataacataaaaataccatacccccggcacccaccttcatcaggaagaatataaaaaaaacaaactctaagaattcatctaaccgaattagttttagagattcggttaccatagactaaatgcctccccattgccttgttaagagtcaggaatgcccctcggaaagatggtggcttatccccttatgaaatggtatatgggttgccttatttacactccactgctgacattcctacattcgaaacaaacaaacaaaaaatcagttttgcaaaaactatatacttagtctaccttccactctctcttccctcagaactaaaggccttttagcacaggcaccacccctggatttcccagcacacctgcatcaacctggagatcacgttttcattaagagctagagggaagcaaaactcgaaccggctttgggaaggacccttcctagtgcttctaaccaccaagaccacagttgaaacagcaaagaggatggacccatcacacccgggtcaaaaaagcaccaccccctccagaatcatggacagttattccagggccaactccaaacaagctaaagctaaaacgggtttaatcctcttatgttgcaactctttcttttccccttctattactagtcctctcatgattaatgtaactaagtcaagttcaccccaaactattacttttaatgcttgccttttgatgctctgtggagatttaccaagccagaggtaacactccacttcagaaaagtatctttgtccttcctagctctcctcagactaaaaatctgttaactaggataagttagtttaaaaatagcttgacaaagattccagtataaactggaatcttgtcctcctagggcagagcttctctgccaaagttggtccaatgctctataaaatactaaagaacaaggatagattgctctaactagtacttgcagtttcttaaaaccttatatttattttactaaagcacttacccctcccaattgtcagctgaaccatcataatccagtacagattaccatctctgctccccagagttcttccccttcattaagctacgtctatagtataagagcagaagtatcagggaaggacgctttaggatcctttaaaatgcacttcattgtttccccacctcctgcacccccttctccctctccaaagttctctgctaatcaaatcttttctcattatatacccaatgataaaaccaaagtacctgttacagaggttaaaaatttaaaacaaactatagcaattaaacaggatatcaagacacaaatgcttggctggaatggattaaatattctgttcacatgctaaacaaaagcgactgttactcttgtgtgacaggcaagccagagacccaaattgtcccctttccacttgggtggtcctctcatggactgggcataagctgtatggcagctgggcataaacagtatggtagctgtatgctagcccccttccaaaaccccacagcctggggcgatgagtcatgcgaaactctttcactgctgttccctgaggtcaagagccctaagggtcagcccctgagggccatctggcctccagtccctaatattaacttcacctcgtgcctttcactgcagggggaaaagttagcattccttggagacttaacagggtgcagtgaaaccaagccttttcaagagcttaccaatcagtctgccttgttcatccccaagcagatgtgtagtggtattgcgagggactattgctgggtactctgccaagccattagggtggcacttatgctctaggccttttccaggtgaaaaggccatccttttccccctctcatttcatcaaccaagaaagataatggcaaaagaccacaaaaacaaaaaatgcccttcgtgtgtcctttaatcctcatgtttatataaatactattgaagttccacaaagagtaccaaataaatttaaggcccataaccaaatagctgcaggatttgagtctatattgttctgatagttgactataaataaaaatgtaagttaaatgaattacatctattacaaccagcaacaatttaattataccaaagatgctattaaaaaaataggtcaacaattaaggctcatcagtcaaatgacttaagaaaataaaatagcattaaatataatactagcaaaaaaaaagaggtagaatttgtgtcataattaaaactaaatgttgtacttttatccctaatagcactgccaccaatgaatcataacaaaagtactacaaggcattactactttgtccaataagctagctaaaatttctaaaataaataatcccttcactaatttattgaaaaatggtttagcaagttaaaaggacttacgtcctaaatcctcacttcccttgctattatactaaatgtgatcattcttgttaagtgttgtattatcccttgcatccataagctaatttagaggcttataaaaacagctctcattaaaaccttccccaattctcccctaccctattcagacaaacttttccttctagataataattttttaaaaattcgacaaattcaagccacgttaaataaatttaaagaaggaagtgtataaattcaagaggggtcaaattgttaaaaacaagtagttcaaacagttcctcttcaaagagtttcactttgttacaaacaaggtattcttctccatgaggtcttcacttccttgtactgtctctcctgaagtcttattccctggtctaaataattcttgcctgccaatctatcaacccctcctgccctgctgtgctcagacatgcccgccaggaaaccaccccctccctgctgtaacagctttacccgcagaaactgttcttccctgcgctcttctaattagctaattacatttagcttagactgtgcggccgaccccaaccaataggggaatgaaacagcaactaaggccaacagggttagggattaaaaaccctctccattaaaaatgctctccattgtgtgatgtgctctcgccattgctccacccacaagatacactcttctatacaagtaaatttgcctagctgagaaaacttatattcaaatgctatttcttttgtggcactaaaaatttgttccaacaatagatttctgtggttttaacctcacttatttaaaattaaatggatttgtaagccatttggtctgtggtattttgttatggtggcctgagctaaggcagattttgtactgagaagtagaggtactgcaattaaaaacaaacaaacaaacaaaaaactaaaaacgtgaagcagctttgaaactgacaaatgagtagaagctcgaaaagttctgatgtgcaagctggaaataaggttgataagggtaattctggtgaggtgtcactggggaatgaggaacatgctattggaaaataaagaaaagacaacccttgatataaagtggtgaagaacttggcagaactgtattctagcattttgtggaaggtagagcttcagagagataaaattgagtatttatcactaagatctgtaattaaagtgttaaaggacacaggaagcttcattcttcctgactgcttacaggaaaatgcaaaagaggagacttgaattgcagaataaattgttaaggaacaagaaaccagaacttggagatttggaaaattctcagcctattcatactacaaaaattagaaaacttgtactgaagagaatcctcaaagtgtggctgaaaaatcatctcataaagagatcatgagtgggattcatggactatatcagccatcttaagagaaatgaggagagagactggattacactagaagagacactgccacttacattgtgccatgtaaaatggacagagaaggcagaacagaacaggcaaggctgtcacacttcttagattttacaagaagcggtcacagaaataatcagctttgaaagtgcactggcagtaaaagatggtttcattcctgccatgatctgcaggatccctgggaacagagaagactcttggaggagcatcttttaacaacccaactctggggcctacattatcttggcttctggtaaattttgacatgaatgtgccactggcagccactaaccaacaggggctggggtcaatctgcatgatttatctcacacagaacttgttaatgctatgatcttaggaatctaatcagcaaggtgaggcagcctgcagtactgacctcaccatccatgacccttcttcacagataccaagactcaggcaaccatgaagttgtattcagaagctgtaggtttaatttcagactcttgggatggcatctaaggccagtccatcagccattacaaccctcacaaggcatttaggacaaatctgataatcttctggtgtcactgccaataattaaagatggcaaccgatgagctaaatggtaacactcatacccttatattcatagggtttctccccagtgtgaattcttttttttgaaatgaagtctcactctgttgtccaggctggagtgcagtggctcaatcgatctcggctcactgcaacctctgcctccaaggttcaagggattctcctgcctcagcgtcctgagtagctgggactacaggtgcatgccaccatgcctggcaaattttttgtacttttagtagagatggggtttcaccgtgttagccaggatggtctcagatctcctgacctcatgatccacccaccttggcctcccaaagtgctgggattacaggcatgagccactgtgcccagccatgattttatgtctacctaggtgtgaggaaacaataaatgctttcccatattctttacatatgaagggtttctctccagtatgagtttgcaggtgaatattaagggatgaggaaaatataaatgctttcccacatatcttgcatacaaagggcttttctccactatgagttttcaaatgttaagtacgatgggaagaagtaatgaaggtttttccacattcaacacattcataaggcttctctcccatctgaattattgtatgttgagtaaggcctgaggatctagtgaaggcttttccacatttgttacactgatagggtttctctccactgtgacttcgtaagtgtatagcaaggcccgtgtactgagtgaaggctttcccacattccttacattcatagggttttaccccagtgtgagttcttacatgttcagtaagttgaattgatctagtgaaggctttcccacagtctgtatatttgtgtggtttttactccagttggagtttgaatgtgatcattaagatatgaggaatttctaacggaaattccacattctttacaatcaaaggacttctcctctttatgagttttcacatgtgcagaaagttgagaaaaattagtgaaggatttcccatatttcttagtctttttgaatttctttccagtatgagctgttacacactgctttaggtgtgaggagggtgtgatggttctcccacattcctgaaattcagagtttctcaccagcgtgaattcccatgtgattatcaaggcttgcaaaacacttaaagccttttccacattccttacatttgtacggttgtcttgcattgagaacttcaagatgttcagcaaggcctggagttagggtgaagacttttccacatggattaaatttagaaagttcctgtccaatagaggcttctttgtgcacactaagggtgtcttttccataacaattaccctcaaaagtgttccctccattctgagctctcatgtgtgtcttaaggaaaaacagctccctgaagacctcttcacaattcttacagagtttccatccactgtagcttcttgtctgctgatgaggggataaaggatttaaaacattttccaacatattaagagatttcacccatttgaacacagaaacattattttgatgacaattattattttacttttcaatgattaaattttttttgagacaaagtcttgttccatcttccaggctggaatgcagtggcacaatctgggctaactgaaacctccacctcccaggctcaagtgatcctcatgcctcagtctcccaagtagctgggaatacaggtgctgctaatgcacccggctaatctgtaccaagtcagccacaaacgccaggccatgttctgagctgattcataagggcagtccaaacccaggaataagatctcagagaagcacacaggttacctcgtagaccttttcagttgatgttggataagcctccacccacccagagtaagtacacacaagaaccagcaaataattgttacctccacatttcggcatttctgtgaaatccacctgaagatcctcaaaaggagccgtacataagcttgtatgccgggtggaacagtgaggccttgcctcgcattgtgctgtcggcaagtaatgcaccattgtgctactgctttgcaagggctggcaagtgtgagatgtagaagtaccggcctaacaatttttcaagtgactcttgacctagatgagtggtttcgtgcatggccaatacgattgtggctcccattaactgcagcacagctaccctcccatctggcagtctgttccatcctccttttattacttgccccccttctgcatggaagaagtctttttcttccttagaataggtagtaccaggtcaggtgtttgagggagtaagggggctgctaccgatgcccggtaaggggtagatgctgcttttcgagtttctgaatcagctcgagagtttcccaaggccactgaggtggaagctcactggtgtcccctgcagtgcatgactgccaccttctgaggtttccacactgcctctaataattgtagaatatcttgttgatattttatgtcctttcccccagagtttaacaggcccttttccttatataatgctccacactccatgcacttggagggttagaaatgcatatcgagagtcagtgtagatgtttacagtcttaccttcactgagttctagagcccgagttaaagaatgagctcagccttctgggctgaaacaccctgtggcaacggtttggcttcaatgacagcatccaaagttaccaccgcatatcctgcacatctttctccttgtgggttgatgaagctgctcccatccatgtataaatcccagtctactgatgcccatggctggtctcaaaggtcaggtctgctagaataaactgagtccaacacctctacacagttacgcttgactgggctctctgatactggaagcagggtggcgggacttagggtgttacagatttcagtggttatgtggggattttcacatagcaagctttggtacttggttaatctagcatttgttagccaatgatgtcctttggtattcatcaaggttaccacagtatgggggacatttatattcaggttttgcccaagggttagtttatctgcttcttgtgctaacagggctgttgctgccagggcccttagacatggtggccagcctttggaaaccccatctagttgttttgagagataggccactggccttggccagggccccacagactgggttaaaaccccaactgccattttttctctttctgacacatagagagtaaagggctttgtgaaatctggtagtcctagggctggagccgacgtaagtttttcctttaacttacaaaaggcttgctgttgtagaggcccccgttcaaaagacacctggtcgcccccctttgtaaccctgtacaaaggtttggctagtactgcaaagtttggaattcataatctacaaaaccccacagctcctaggaattcccttacttgccttctggttttaggttctggtaggttgcagatgacctgctttctttctgccccagggtgtgctcccctttccgaatagtgaatcccaggtagcgtacgtgctgtctgcaggtcttagctttcttcttggacaccttatatccacagtcttccaggtgccaaagcagggcatccgtcccttttgtgcacccaactgctgtggagtgtcccagcagaacgtcgtccatgtacaggagcaagacgcagcctaggtcttcagcaggaagcttttgcaggtctcgagccagggcctccctgaagatagtaggggagttcttgaacccttggggaagccaggtccatgtgtactgagtagtgacacctgaccccagatcttcccattgaaaggcaaacagcttctggctctcaggagctagtctgatgctaaagaaggtgtcttttaagtccagacaggtaaaccagctgtcctcagctggcagcagctctaacaatgtgtaagggttaggaactgttggtgcagagtcactgtagcttggttgaccaagcgcaagtcctgtgctggccggtagtccttggtccctggcttagggacaggcagcagggtggtgctccgtggagactggcaaggaactataactccacaggctttcacgcacatgagatgaacctggattccttcaagagcttctctgggaaccggatactgcttttatctaactggttgggccccaggcttaacttctatgagtatgggggtttggttgactgccagttccagaggattatcttctgcctatacttgaggccattgtttagctagagctggttttatctcttggcctggctctgttagaaaaagtctccattattcttcctgaggaactgtaagggctgtgataactcctgttcctggtaattttagatgtaaagagctctgttttgtaaaggagatggtggctctcagcttgctaagcaagtctcttcccagcaagggcaagggacagtcaggcatgtacaagaactggtgaactatttcatgtccccccaccgaggatgtctgtggtagacagaaagcctgcttagtggaaactcctgttgctctgattatatcagtggttttcttggataagggggtgaccagggtggtcactactgaatgttcagcaccagtatcgaccaaaaacttaatgtccttgcccccaattgtaatcctgaccgtgggctccttgggggcgcttgagcctggttgccttcactctggtggtccttcagccagattgaacaaagctccctcatctttatctgagatcttttgttccgaatcaccttgcttttccttcagttagggacacttatctttccaatgtcctatttccttacaataggctcattggttatgttgcaagcatgggcaattagactgggtattcttcccggaacccccctttccctctccttttgggggaattcccctaatggccatggccagtaagttggtgtttcgcttggcctggcgttcaccttccttacggctttctctgcagcttgttgcatctctgttcacaaacacttgattgactatttccagtaactgtgaggtattcatacccacaaacccagcctgtttctgcaattttctcctggtatcttctgcgctttgactaactaaggccatgttaatcatgcgctgattttcagggctatctggatcaaaaggagtgtacataaggtaagtctcacacagtctttcatagaattgcgctggactctcctcttttccttggatgacctcagagaccatatttacatttgtagcctcttgagcccctttctttagaccttctattaatgcctcacagtaccatgtctggtcccttgtttgggtcccattgggggtctgttcctggcagctgaattcttatatattactgggggttttggtaatctgctgggacgtactcctctagccacttagttgctgcctggagcacccttcgctgttcgtctgtattaaagaggtacatgagtagctggtggcaatcagcccaagtaggattatgagtctgcataatagtttggagcaagtcaattaaagcttgaggctttttggtgtaagatggagtattatttttccaattgaggaggtcaacagaggtgaaaggttgacacacaaaggcatgcctttccaccacgtctccatcctcatctaccccagtatatcgctgctctctcaggggtgtttggattccagtcttgggctgtaagcgagctgccaaaggaggagtttctcccacagcttcacttcctcttttgtccactctgggtggtctaggagtgtggctatctggcagaggtataggtgctgtgggctcaggagtggggaccccttcctctcgataaggagggggtactgctggtaccaattcctgccatgattcttctggtgttgggtctgacaggacttttggtgctgatttcccttggtgtgtggagcaagaaccttccttaactgtccctttcctactagtactgctgctgcctgtcatcttaaccactgtgggggatccaaaactagctttaaccaagaatctatatacaggaaatgatctgggtgcctggcttatgggttaccctgtgccataccttcgagacaagggacctgtccaggcttccgatggccaatccacctctaatgcaggccagtctatctcacacaaagttctaagttttcctgctgtcataataactccatagtctcccttaaatccctttttgaaatttttcaacatattcctagtggggtgggcttactttgtgcctgacccatgtttccttgagacaaaacaccacactcaaaccacaagcacaccacaaaataaagaacgagtaaagaggacacacacacacttttatagtttatgccaaaccagaatcagaacaaaatcagagtatcagggaatccaagccaggtcaaaaccaaaaccaaagtatcaagcaatcccagtcaagtcaaaaacaaaaaccaaagtgccagtacaggcatgtcatgggtgatcaggccacgcttccactcaaatggagtgggcaagttccaaagaccagtcttaccaagtttcagatgtccggactccaagtgccagttccttcccggtgttcagccactgtgttgatcctccacgggggcctgccacgcactgctccagcgaggtgttccaccggggcaactgactacctgggaatgctctcaggatccgagtcgctcaagctggccagagtcccccagagggatgctccacaggggaggcctaagccacctaaggggctgcctcaaccttccattaatcacctcgcttcccagccagggaatcaagaaagtgtagcaggatgagccacagacaagaacccctcagacaccgaattgtagaaggaaagggctttattcagctgggagcataggcagactcacatctccaaaaacagagctccctgagcgagcaatttctgtcccttttaagggcttacaactctaagggggtcagtgtgagagggttgcgatcgattgatcaagcagggggtacatgactagtggctgcatgcacctgcaccggtaattagaatggaacagaacagtacatggtttttcacagtccttttccatacaatgtctgtaatctatagatagcataaccaattagttcaggggtctgtctttaacaactaggcccagggtttgacgccgggatgtctgcctgtgggtttcatttctgccttttagtttttacttctttttttctttggaggcagaaattgggcataagacaatatgagaggtggtctcctcccttactttgaccaacatctccccaacccatacccctaagcccctggtaactaccattctgtctctccttctatgaatccaactttttaaattatacatacaagggagatcatctggtatttgttttcccatacctggcttatttcacttaacatattgtcctccacatccatccatgatgttgcaaatgacaatgtttccttttaaaacatacaccacttttgaatgtgttttattcagtctacaaagtcacctatgagacattcagtggggtcacagaaggaaagtgctttgcaagccaggcgaggtgcctcatatttttaatcccagcactttgggaagccgaggtgggtggatcacctgaggttgggagttcaagagcagcctggccaacatggtgaaactccatctctactaaaaatacaaatattagctgggcatggtggtgcacacctgtaatcccagctacttgggaggctgaggcaggagaatcggttgaaccctggtgacagagggtgcagtgagctgagattgtgccattgcactccagcctgggcgacagagcaaaactccgtctcaaaaaacaaaacaaaacaaaaaacaaagcaaagcgccctgcatcaagttcaggctgctctataacattctcaagcacttcgtccaaatgatctagtagatccaatcatactcaatgcctccatagcattctctggcaagcaccaataggagacgcgcagcacagtagtgtggagcaaatccatgccatcttctgcaggaaactaccctctttttgagaaacaccttggctctggtactaggtagaaacaactgaccggtgatttttttttttttttttttttttgagacggagtctcgctctgtcacctaggctggagtgcagtggcgtgatctcggctcactgcaacctccgtctcctgggttgaagtgattctcctgcctcagcccttctgagtagctgggattacaggcgcacgcccccacgcctgactaattttttttttttttgtatttttagtagagacagggtttcaccacattggtcaggctggtctcaaactcctgacctcatgatccacccgccccagcctcccaaagtgttgggattacaggcgtgagccaccgtgcctggcctaacacgtgatcttaagattatgttagtgaagttgatccatatcactgtatctacctttattacttcatttgctgtagagcattccagtagtataattatgccacaatttacccattctgttgatctcatttgagtaattcccaattgaggattacatcaaataatgctggtgaaatgtctttaatgttatcttgatgcacactggagccattactcttatgttagagcacatgtacgtgtacaaatttagtagatgttgccaatagtttttgaaattttctctaatactctctacaaccagcagaatacgcacatcctcatcagctttatcttcagaacaaaccatttttttctctgtgtccagctagctcactgggacccctaagtgacaaatacagatggtaatgtatttctttttttttttttttttttgagacagagtcttgctctgtcgcccaggctgtagtgcagtggcacgatctcagctcactgcaacctccgcctcctgggttcaagcaattctctgcctcagcctccccagtagctgggattacaggcgcccacaaccatgcccagctaatctttgtatttttagtagacggggtttcaccattgtggccaggctggtcttgaactcctgacctcatgattcaccctcctcggcctcccaaagtgctgggattacaggcgtgagccaccgtgcccggcccaatgtgggtatttttaagcctcatgtttccttcagagctttctggcagcccatgtcagcaagagagtcttctgatttcatttacccatggagtgagtagatgtgtcggtgacataggagtctcacacgggactggtaactctgtacatttcttctgggaaatggagtcctactttgggtaggaagaacccaaagttgaactgaataccacggagagccttgcccctccatatatgaacacatatttgctaagattggtaattaagtgaattttcatgtagaacttattttcaagtgctcagccagccactgattctgattctttcaattaatttcctacttaagaaaattagtttttcatgagtagaataaagtgatgattagacatcattttttctgtagttataatgttgtagattagattcatccctcattttaatccccaaagaaaattctatcaaacctaagaaaaacccttgatgtactcacctctctccgtagatatgtaatcagccaatttatatgatgctttccttaactcctactccctttcctttcaatatggcttatttagacaccatctttttggtctcaccttaaatagaactcacttttcttacattcatctattcccatatatacacatagaaaacaatactgtcctctacttccaaaactctcatcaatttgtaataataagtcaagcgcagtggctcacccttgtaatcccagcactttgggaggctgaggcaggtggatcacctgaggtcaggagttcaagaccagccaggccaacaggatgaaacccccatctctagccaggcgtggtggcgcatgcctgtaatctcagctacttgggaggctgagacatgagacttgcttgaatctgagaggcggaggttgcagtgagcagagatggcacaactgcactccagcctgggcaacagagggagactctgtctcaatttaaaaaaaaaaattgtaatgaaacatttatttgcttggttagacgtctgcccctccactagtttacaagttccctaagagcagcccttggttggattttttttttttcattatgccttaatgaaccattagcattaatcactttataagaaatacaaaaaataaaagaaatatttaaacacaccataagtctacaatcagaaatattaaaatgggtgtctttctgaaataatatgtgactcttcaaaaagttgatttgacagagaaaccatagtaactggtctaggttcaaagatactaaaggccataaactttaaatagatcttaggtcccaagggcctattttggaaccatgtagagaattttgtttttacaaagtagatactagatgagtcgttcttttttttttttttttttttttttttgagacacagtctccttctgccacccaggctggaatgcagtggcgcgatctcggctcactgcaacctccacctcccgagttcatgtgattctcccgtctcagctggtgggatcaccggtgctggctttatttatttatttatagtagagatggggtttcgccatgttggccaggctggtctcgaactcctggcctcaagtgagccacccgcctcggccttccaaagtgctgggattacaggtgtgagccactgtgcccagcctaaatgactttttttaaatttttcttggttgaaatacaaatactgtggttttagtagaccagtatcctttatctttagaaaatgcattaccaactacctgaaagtcaagtatcaatttcctgcaattttcaacttaccctcaaatacttcaccataaaaggtattttagttttctagggagagggcgaatggtaaatttgattcctaatactagtgcaacaaaatctatatcctttcctcctgggtgcccatttttgtctttttgtttaagaggcaaggtcttgctctgtagcccaggctggagaacaatggcgtgatcatagctcactgtagtctggaactctctgtctcaagtgattctcccgcctcagccttccgagtagctggcacacaccaccatctctggctgatttttaattttttttttttttttttgtaaagacggggtctcgctatgttgcccagattggtcttgtaccccgggtacgagaccccgtaccccgggtgggcccctggtttgttcgtttgcttgggttttttgttgttgttgtttttgagacagagtctcggtctgtcaccccagctggagtgcagtggcacgatctcagctcactaacttcctcctcctggattcaagtgattctcctgcctaagcctcccaagtaattgggattacagacgtgcgccaccacgcctagctaatttttttgtacttttagtagagacgaggttttgccatgttggccaggctggtctcaaactcctgacctcaggtgatttgcctgcctcggtctccctaagtgctgggattacaggcgtgagccaccgcacctggccagcgcctgtttttaaaatctgtggggaggtccaggcctacgaagttcagatcaaaatagcttagcattcttatttttcttcagtagaaagacctgtttgtggtctacataattttatatttccgtagagaaatatgcactccctagatacttattaaagtgtctttataacagaatgtatggcgtcaaaaatacgtttatgacgcataaacaaaggaacattctcagttgaaacattcgttcgtataacaagatgcccccttgaaccatccctcacccagtgctcaccggaatgcgcgggaatcgcagggtctgtaaggcaggacgacgctgggggacaagttaacgtggctcaagtggaggaaattcttttcctcatagaaaaaactcacaatggtctttttggaggcttttgaagggagctccatgggtgagggcggcaattatcgaccccgactttcgcgaggactgacagcccgagcggcctcgcagacctacctgacgcgagcacagcaggccaagtatctctaagaaggcccctcggcagcttcggataaacttcaactctcaccacccgttccactaccagtacacttgctccctccgaaatcaaggacaaccatgggtaaacctcgctcaggctcgcggagccagtaccggaaaagagggtggcgcctcgcttgcgtcacttccgcttacagcctccagccaggagtggctctgctgctcgtgcttcagccttgctggaagacattacgtcgagaaattctagtttcctcccgcgtgggtgcagctgagacttgctgtggactcacagaggaagctggagtccccaggttcagagaacaaggttgaagttagtcaggcctgtggagggagctatgggccaggggcacgggcccacgctagaggaccaggaggaaggtgaggccaggcccagaggatgagcttgaggttagaatcaggcctgtgggccggactacgctgggggaggagccatgattgggggcggagcagaaggtgggtccaagcccagaacaccaggttgagatcagatccagtcctgtggatggtagaagggcagggaggaaggtggggcctggccccaagtaatcggcctgtgtgggcctcccaaagtggtgggattacaggcatgagccaccgcgccctggccccggactctcaattctataccattaatctgtagctctgtccctaagccagtgccacattgttttgattactgcaactttgtagtaagttttgaaatccagaaatgggagtccttcaactgtgttcctctttttcacaattgttttggctatttggtgttttttccatttctgtttgaagtttaggattcacttgtcaatttctgcccagaagccaatgtcaaaaaaataaataaaaataaataaataaataaaaaagcactggaaaaagcaagatcttcattaattttagtcacctgtaccagatttctctttctttctttctttttttttttttttttgagatggagtctcgctctgtcacccaggctggagtgcagtggcacaaacttggatcactgccacccccgccacccaggttcaagcaattctcctgcctcagactctagagtagctgggattacaggctcccaccaccctgcccggctaattttttttttggggtgggggacagagtttcactcttgttgcccagactggagcacaatggcatgatctcagctcactgcaaattccaactcccgggttcaagtgattctcttgccgcagcctcccaagtagcagggattgcaggcacctgccaccacgcccagctaatttttgtatttttagtagagacagggtttcaccaggttggccaggctggtcttgaactcctgacctcagaaaatccacctgcctcagcctcacaaagtgctgcgattaccggtgtgagcctcagatttttctttaggcatggaagtgtaggggtctacattaggagagagttaagagtgtaacagtatcatgggttaagcagagctcaggaggaaaaccaaaaaatattgtatccattttgtaccttaggaaaggccatccatgagcatcactgggtggagatttttgggtaagaggtgtatagtttctagcacaagggtcaaactcaactccgatggaaaattcttcgttggggcagtgtcttctgaggcaatgtcatctcagccagtgaaatttgggggccagagtgatatcatgatgtcatctgggatgtgggactggggaatcctttgttgttgttgttgttgttttgagatggagtctcactctattgcccaggctggagctcagtggtgggatctcagctcactgcaaactctgccttccaggttcaagctattccaatgcctcagcctcccaagtagctgggattagaggcacacactgctatgccaggataatttttgtgtttttagtagaggcagggttttgccatgttggccaggctggtcttgaactcctgtccttaagtgatccaccttccttggcctcccaaagtgcagggattacaggcatgagccatcaagcccagcctgaggaatcattttacgtgagtacccatttgagttaatagggacctcctgagtgtaaaccagtgaaagtacagaaactagtagtaataacaccaacagtaaacagaatggtgtgcaactgtgcctgacagtttttgtttttgggttttttttgtttttgtttttggtggaaatttagctgctttttgtttggagggttttttcgagacagggtctcactgtattacccaggttggagtgcagtcgtgcaatcatagctcactgcacccttgaatccctgggttcaagggatcctccctaagctactgagtagctggggctagaggcgaatgccaccatgtccaactcatttttcaatttttttgtagagatgggtctcattatgttgcttgggctggttttgaactcctggcttcaagcaatcctcctgcctcagcctcccaaagtgctgggattacaggtgtgagccaccgcacccggccaaaattaagtttaaatgggtcctgtggccaggcgcggtggctcacacctgtaatcccagcactttgggaggcgaaggtgggcagatcatgaggtcaggagttcgataccagcctcaccaacatggtgaaacctcgtctttacttaaaaaatacaaaagtgagccaggcgtgttggcacgcggctgtaatcccagctactcaggaggctgaggaaggagaatagcttgaacctgggaggaagaggttgcagtgagccgagatcacaccactgcactctagcctgggcaatagagagaggctctgtctcaaaaaaagatcataataataaaataaaataataaatgggtcccgttatcagatgatcagctggctggcctgtgggacaatctctgcttaatgagtccaaagaaagcatatacactcaatctggattctaatccctgagagatgggggcaaaattaaaaatttgttaagattggttaagatttggggcaaaatataaacttatgtaggggtttatttgttggactgcaatttgaaaaggagttgtttgaggacttcattacatccctcagttaaaatgtctatttggaacctgttagggacacaaaacgtctattgaatgcctttttcaagagcctagcgttctgtattttaagaagtgaaatgtgtgtcttggttactatcagtaatgcctgttactccaaagggaatgtggagtggccttgcagaggctggtattgcggcctcagtatacgtggcaatgtgttgttttgatttatattttcggtatcagtcaggcaagagatttccagactttttttttaccttatggggacaatatttaggtaatggctcagttgtgtataataaacatgatgatgggatcatatgtttgaccagggcatccagtgccaaaacagttgccaaaagtacggccaagcaaattgtttcttggatcctgtcctttaaaaaaagaaaattagccgggcgtggcggctcacgcctgtaatcccagcactttgggaggccgaggcgggtggatcatctgaggtcaggagttcaagaccagcctggccaacatggtgaaactctgtctctactaaaaatataaacattagctgggcgtggtggtaggcgcctgtaatcccagctactcagaaggctgagacaggagaatcgttttaacctgggaggcagaggttgcagtgaaccgagatagtgccactgcactccagactaggtgactcccatatatatatatgggagtttattaagtattaactcacaggatcacaaggtcccacaataggctgtctgcaggctgaggagcgaggagagccagtctgagttccaaaactgaagaacttgaagtctgatgttcgagggcaggaagcatcccgcatgggagaaagaggtaggctgggaggctaagccagtttctctcttcacatttttatgtctgcttatattctagcatctctggcagctgattagattgtgaccccccagattaggggtgggtctgcctttcccagcccattgactcaaatattaatctcctttggcaataccctcacagacacacccgggatcaatactttgtatccttaaatccaatcaagttgacactcagcattaaccatcacaccaatctacaagagcaaattatttatctgttgttgaatgaatagaatcagtaatctaaataatattggaaattgagtatggagaccctgatggatgggaccacaacattaagtcaataattagtccatcacgaagggccatttatcacttttattatttgttttgtttattttctagagacagggtctcactctgtttcccaggctagagtgaagtggcccagtgacagctacctgcagcctcaacctcctggactcaagtgaacctcccacctcagcctcccaagtagctgggactacaggcacacattaccatgctcagctaatttattctttttgtagagatggggtctcactatgatgctcatcttcccaccttggcctcccaaatctctgggattataggcataagccaccacagttcacccttgtttttaaatcagtaactaatctagggatagaattctgtttactagccttgatgtttctttagtacttacagtttcaagttactcatttccaccaccttggatttacagctgcctagagcagccagaagtctttttttctcccctcaaacctccccattttaggctttgagttgcctaaagccacagttctttgtgtttgttttggttggtttgagacagatccttgttctgtcacccaggctggaatgcagtggcacaatctcagctcactgcaacctccatctcccagaaagccacagttcttaaattccatctctggttgataagaggaaatgagggagcagtaaaggtccgatgcctataggcagtagcctcaagacaattggtccttttcttccccccaattttttattttacataaaatctttacaatggcttgtatttctaagtggctaaaaaaaattttttttttttggccaggcacagtggctcatgcctgtaatcccagcactttgggaggccaaggctggtggagcacttgaggtcaggaacttgagaccagcctaatcaacatggtgaaaccccctctctactaaatatataaaaattatccaggcatggtggcacatgcctgtaatcccacttactcggaaggctgaggcactagaatagcttgaattgggaggtggaggttgcagtgagccaagattgcaccatagcactccagcctgtgcaacaagagtgaaactccatctcaaaaaataacttttttcctcttattttggatgtttacttgacatactggttgcttggtccccactggctcctgttgtaagcagtggactccatttggttccctttggccccatggacaggcagtcacctccctccctctctctggtgtccccattgacctcattagggtcaggtgacaaagaactacataagccagtgaaggcaccaacatagagatcccagaccctggcagtacgtttgcctggaatgggatatgacttcctggggagggggcacccctcctactgaaggaaccctgtggggttttggcacatcaccaccaagagcgagggtctaacagaggccagtcttcaaactcccatgaggggttttgccaaatactgggtatatatatgcatgaagctggggttgcccctttcctgttccagaacttatgacatgaattgcaatcttgaacagcttagccaatttggttctgactcattcattggactaacagtgagtatagttctccctcttgctgtactagggctgggtttttagtctaggccaagtgataccagaacaggaaaaactggtattcttattgcccctttagtgttacttgtaatgtcctctgagctggccacaccatggtcaagccagcatgacattcacccgcccttgtgataatgtactttgtgatattccccaaccttgtgaatgtactttgtaaaattcctccccacccgtgtgacaatacaccctcccagcccttgtgaatgtactttgtgacatccttcccacccttgtgaatgtactttgtaacatcctccccgcccttaagaatgtactttgtaacaaccatcccttgcctgcaaaacaattgctcctaactccacagcctatcccaaacctataagaagcaatgataatcccaccacccttcgctgactcctttctcagactcagcccacttgcagccaagtgaataaacagccttgttactcacactaagcctgcttaggcagtctcttatatggtcgcacataacatttggtcccaaaaacccaggacaagggaactccttcaggagatgtgtcccctgtcctcaagctccctgcatgaggagatccacctatgacctcggggcatcagaccaaccagcccaaggaccatctcaccaatttcaaataaataagtggtttttggcacttgggtcagcagttttttcactcgctacttaacctctctcacctcccttcaatctctctttcaatttcagtttctctcctttcctggtagagacaaaaaggagacacactttatccgtgcattcaaaaactctgacattggtcacagacttgggaagatagtcttcccttggtgtctgatcaccgtggggacgcctgccttgatcattcaccaacattcccttggtggcaggtcaattgcagggatggctgctttggcagctcacccacattacagcctaggactcagtcagggatgcctactggaagactggtagctgcccacctccatttctccgtgtctctaccttcctctttaaacttaccttctccactatgcgcaaccttccatcatccattcttacctcttcccccttagcctgtgttcttaaaaacctaaaacccctttgactaacacctgacataaaagctaaatgtcttattttcttctgtaatattgcttggccccaatacaagctcgacaatagttccaagtggccagagaatggcactttcaatttgtctatcctacaagacctcagtaatttttgtcgaaaattgggcaaatgatctgaggtggcttacgtccaagcattttttacattttgctccctccctagtttctaccaccaatgcaactcatcccagattttccttcttttctctcctgtctgcttcttcggtcttcaccccaagctcagagtcctctgaatcctccttttccagtgacccctctgacctctctcctcccccagctgctcctcgccagggtgaatcaggtcccaattcttccacagcctctgctctcccaccctataacccttctattacctcccctcctcacacccagtctggcttatagtttcattctgtgactagctctcccccacctgcccaacaattttctcttagagaggtggccggagctgaaggcatagagtcagtacatgtgcctttttttctattagacctttcccaaatcagtcagcatttaggctctttctcataggaccccactaaatatatacaggaattccaatatctaactcagtcctacaacttaacctggagtgacttaaatgtcatcctgacctttaccccctccccagacaaacaagaaagagtttattttctagcccagtcctacacagacacccactggcttcatgagccaggcctccaagagggcaccagggctgttgcccgagagtatccccattggcaataccagacagactccccaggtatagctaggcgagattacatggtctcctgcctagtcgaggggctgaaaaaggcagcatacagcgctgttaattatgacaacctaaaggtaactacccaaggtaaagttgaaaacccagcccagttcattgcccgcttagcagctacccttagacactttacagcactagaccaagaggggccagaaggccaccttatccttaatatgcattttatcacccaacctgctcctgacattagaaaaaatctccaaatttggattctggccctcaaaccccacaacaggatttaatcaatctcaccttcaaggtgttcaataacagagaagaactggccaaacagcaacgtatctctgagttacagctacttgcctccactgtaagacaacccacaacatctccagcatacaaaaccttcagaacaaccaagacacagctcccaggggctccttcaaaacctcctggtggaccttgcttcaaatgccaaaagcctggtcactgggcctcggaaagcccgcagcccgggtttcctcctaagccatgccctctctctgtgggcccccactggaagttggactgtccgactcacatcgccaccattcctaaagctcctggagctcgaacccaactttccttggcagactccttcccagatctcctcgacttagtggctgaagactgatgctgcccaatcaccttggaagcccccaagaccatcatggatgctgagctttgggtaactcttacagtggagggtaagtccatcccgtttaattgatatgggggctacccacacaacactactttcttttcaagggcctgtttcccttgcccccgtaactgttgtggttattgatggccaggcttccagaccccttaaaactccccaactcttgtgccaacttggacaacattcttttatgcactcttttttagttatccccacctgcccagttcccttattaggctgagacattttaatcaaattatctgcttccctgactatttctggacctcagtcacacctcattgctgcccttttgccccattcaagacctcttttgaatcctcctttcgtgtcttcctaccttaatcctcaagtgtgggatacttctactccctccttggcgactgatcaggcaccatttaccatcccattaaaacctaatcacccttacctcactcaacaccagtaccccatcccacaataggctttaagaggactaaagcctgttatcactcacctgttacagcatggccttttaaagcctacaaattctccttacaactcccctatcatacgtgtccagaaactggacaaatcttacaggttggttcaggatctttgttttattaaccaaattcatcctgtagtgccaaacacatgtactctcctatactcaatacctccctccacaacttattattccatccttgacctcaaagatgcctcttcactattcctttgcacccctcatcccaatctcctttcactttcacatggactgaccgtgacacccaccaatctcagcaactcacctggactgtactgctgcaaggcttcagagataacccccattactttagttaagctctttctcatgatctactttctttctgtccatctgtttttcaccttattcaatatatggatgaccttctcctctgcaactcctcttacgaatcttcccaacaggataccctcctgctccttcaacatctattctcaaaggagtatcacgtatccccatctgaagcccaatttctttcccatctgttacctatcttggcatagtccttcatcaaaacacacgtggtctccctgataaccatgtctggctaatctccgaaaccccaaccccttctgcaaagcaacaactcctgtccttcctaggcatggttggatacctttgcctttggataccaggttttgccatcctaactaaacccctatataaactcacaaagggaaacctgactgaccccacaaaccctaagttctttccccactcttcttttcattccttaaagacagtcctagaaacaggtcccacattagcactccctaatttgtcccaatccttcttatatacggctgaaatacaaggctgtgtggttggagttcttacacaggaaccaggcccacgacctgtagccttcctatccaaacaacttaacttcaaagttctaggctggccctcatgtctatgtgtggtggcagctgctgtttcaatacttctagaggccctcaagatcataaaccatgccccacttactctctacagctctcataactttcaaaatctattttcctcctcacacttggcgcatatactttctgcctccagactcctccaactctacttactattcattgaaactctcacagttaccattgttcctggcacagacttcaacccagctgttcaccttatacctagcaccaaacctgaacctcatgactgtatctctcaatccatatggcatcctccacatttccccatatttccctctttcctgttcctaatccagaccacacgtggtttattgatggtagttcttcaaggccaaatcgtcagtcaccggcaagggcaggatatgttgtggtgtcttccacatcggtcactgaagctactgccctgcacccttccattacctctcaacaagccgaactcattgctttaacccaagatctcacccttgtaaagggactatgtgtcaatatctacactgattccaagtatgccttccacatcgtacattaccatgcagttatatgggcagaaagaggttttctcactacacaagggtcctccatcatcaatgcttccttaataaaaatcctccttaaggctgctctactgcccaaggaagccagtcattcactgcaaggggcctcagaggttaccagatcccattgctcgaggcaacgcttatgctgataatgcagcaaaagcagcagctagtattcccacatctgtccctcatggccattttttttccttctcatctatcacttccacctattctcccactgaaactattacctatcaatcccttcctactcaaggcaaatggttcttggatcaaggaaaattcctccttcctgcttgacaggctcattctatcttatcaccctttcataacctcttccatgtgggttacaagccaatggcccatctcttagaacctctcatttcttttccatcatggaaatccatcctcaaggaaattacttctcggtgttccatctgctactctaccacccctcagggatatctcaggccccctccctttcctacacaaaaagctcgaggatttgcccccgacccaagactatcagattgactttacccataggccccaagtcaaaaaactaagataccttttggtctgggtagatacattcactggatggatagaggcctttcccacaaggtctgagaaggccaccacagtcatttcttccctcctgtcagatataattccttggtttggccttgccacctctatacagtccaataacggaccagccttcgttagtcagatcactcaagcagtctcccaggcccttggcatccagtggaagcttcatgcccctactgtcctcaatatttgggaaaggtagaaagaactaacagtcttattattattattattattattattattattattattattgttacattaggttctagggtacatgtgcacaacgtgcaggtttgttacatatgtatacatgtgccatgttggtttgctgcacccgtcaactcgtcatttacattaggtatgtctcctaatgctatccctcccccctccccccagcaggccccagtgtgtgatgttccccaccctgtgtccatgtgttctcattgttcaattcccacctatgagtgagaacatgtcttgtttggttttctgtccttgcgatagtttgctcagaatggtggtttccagcttcatccatgtccctataaaggagaagaactcatccttttttatggctgcatagtattccatggatcatatgtgccacattttcttaatccagtctatcactgatggacgtttgggttggttccaagtctttgctattgtgaatagtgctgcaataaacatacgtgtgcatgtgtctttatagcagcatgatttataatcctttgggtatatgcccagtaatgggatggctgggtcaaatggtatttctagttctagatccttgaggaattgccacactgtcttccacaatggttgaactagtttacactcccaccaacagtgtaaaagcggtcctatttctccacatcccctccagcacctgttgtttcctgactttttaatgatcaccattctaactggtgtgagatggtatctcattgtggttttgatttgcatttctctgatagccagtgatgataagcatttttccatgtgtctgttggctgcacaaatatctccttttgagaagtgtctgttcatatccttcacccactttttgatggggttgtttgattttttcttgtaaatttgtttaagttctttgtagattctggatattagccctttgtcagatgggtagattgtaaaaattttctcccattctgtaggttgcctgttcactctgatggtagtttcgtttgctgtgcagaagctctttagtttaattagattgcatttgtcaattttggcttttgttgccattgctttcagtgttttagtcatgaagtcctagcccatgcctatgtcctgaatggtattgcctaggttttcttctagggtttttatggttttaggactaatatttaagtctttaatccatctcgaactgatttttgtataaggtgtaaggaagggatccagtttcagctttctacatatggctagccagtttaactggcaacatttattaaatagggaatcctttccccatttcttgtttttgtcaggtttgtcaaagatcagatggttgtagatgtgtggtattatttccaagggctctattttgttccattggtctatatctctgttttggtagaactaatggtcttttaaaaacatacctcaccaagctcagccttcaacttaaaaaagactggacagtacttttaccgtttgccctccttagaattacagcttgtcctcgagaagctacagggtatagtctatttgactatatggacataccttcttgctgggcccccaccttgtgccagacaccagccctctaggcgactatcttccagtcctccagcaggctagacaggaaattcaccagcctgctaatcttctcttgcctactccagattcccagccatatgaagacaccctagctggatgatcagttgttgttaagaatctgatccctcaaactctacaaccgcgatggactgcttagtcatctatagtaccccaactcccgtccacctgcaggaccctccccattgggttcaccattccagaataaagctgtgtctgtcagccagccagcctgatctctcttcttcctcctggaagtctcaagcactctcccctacttcccttaaactcactcgcatttctgaagaacagtaatagcccttataaacctaacacatcccttcattctattaggtctattcgtccttaccctactttttgcaacagggctttatgaagtcatccccactacttggactgtgcccccaagacttgtcatccctattatcttctgtctagtcatacacctattcatcattctcaactactcgtaaatgccctgcccttgtttacgctgccagtttaccagtttacacttttcctccaagtcaccataactgatatctcctggttttacttcaaatagccacccttaactctcttgcagtggatataatatcttcagtggcaagatacattccaattctcctatcctgataagtctttctttttttttttttttttttttacttttctactcactcttatccttgcccctattctccagtcactctctacctctccctagttacctccagcatagtatcaacctcacccactctctcctcactgcctccaatccttctctagtaaaaaattgttggctatgcatttccctttcttcctgctcttatgcagccgtccccgctctacaggctgactgagctacctctcctgtctccctacacctctgaaccttctttaatagcccttgtctttacccacctgaggaacttctttactttctagacagatttggtgagaactccccagagatttcgcattaaaaagcggccacacttctccgcatctacttacggcacctttctctttatgtcaattccactcccccccatatttggacccctaaccacacaaacaactatccctgttgctgctcctttatgcttctcccaaaaacagcctactggaatccctttaggaaaccttccaccatccaaatgttcctttactctttatctccagaaccaagccacacacactaccaaacagatgggagcattccaacttcacattactgataagctctctatcattactgacaaactaaaaaacattggcagtcactaatgcttaggaagacacctaccctgcatctcactccatctttggctaccctcgccctgctcatttgactctcctcctgacccctcctcttgcttgcttatacccagccccatgaatagtagtgaaagactactcacagatactatgtgctttcttatacaccatgagaactgaaccttccctctacgcagttgcaccatcaatccccattacaacctctaatggctgctgcctttgctggatctctaggattttgggtgcaggacccctctttcactacaccctctcaccttttcactttacatttccagttatgcctgacacaagctctcttatttttctgtggttcttccacgtacacctgccaactggatgggcacatgtactctagtcttccttacccccaaaatccagtttgcaaatgggaacgaacaactgcctgtccccctcatgacaccaacatgacaaaaaagagtcatcccattaatccctttacttgtgggtctaggaatttctgccttcactattgcacttagaactggaatagcagctatctcaacctctgtcacaccattctgcagcctctctaatgacttctctgtttagcattacagatatatcacaatctttatctgtcctccaagcccaggttgacactttagctgcagttgtcctccagaactgccaaggcctcgatttactcactgctgaaaaaggaggactctgcatatttcttaatgaagagtgtttgtttaactttaatcagtctggcctggtatatgatgacgtcaaaaaactcaaaaacagagctcaaaacctcgctagtcaggcaactaattatgctggacccacctggccactctctaactgggtatcctggcttcttccaatcgttagttctctaatacctgtcttcctccttctcttattgagggcttgtgtcttctgattaatctctcaattcctacaaaactgcatccaggctatcactaatcactctatacaacaaatgctgcttttaacaaacccacaatatcaccccttaccccaaaatcttacttcagtctaatctctcccactttaggttcccacaccaccgctaatcctgctcaaagcagccctgagaaacgtcacccatcactcctccatacagccccaaaatttcaccccaagttttcactattcttattttatttattatttttatttcttattaacataaaaaaacaggaatgtaaggtcctctgagctggccgcaccatggtcaaaccattgtgacatccccggcccttgtgataatgtactttgtgatattccttgtcctgtgaatgtacattgtaacattcctccccacccttgtgaatgtaatttgcaacaccctccctgctcttctgaatgtactttgtaacattcctcccatcccttgtgacaatacaccctccgcgcccttgtgaatgtactttgtaacatcctccccgcccttgtgaatgcactttgtaacattcctccctgcctttgggacaagacatcctccccgcccttgtgaatgtactttgtaacatcctccccactcttgagaatgtacttcataacatccatcccctgcccacaaaaaaagtcgctcctaactccaccgcctatcccaaacctataagaccaatgataatcccaccatcttcactgactcctttctcaaactcagcccacttgtaccctagtgaataaacagccttgttgctcacactaagcctgctcaggtggtctcttatatggatgcatgtaacattactgtaaaatgagatcttgcggggtgcagtggctcatgcctgtaatcccagcacttcggaggccgaggtgggtggatcacctcccaaagtgctgggattacatgcatgagtcaccatgaccagccaggtatttctttataacaactcaagaacagactaatacacgtgactatttccagactattttgtaccaatagtctagttgtctgtgtacaatgcaacagcatcttaattactatagttttaatcttgatattcattagggcaagttcttccaccttttttatcagctgggtcttgattatccttgcctattgttcttccatataccttttagaaacagtatttcaagggcgggtgtggtggctcacgtccataatcccagcactttgggaggccaaggtgggtggatcacctgaagtcaggagtttgacaccagcctggacaacatgatgaaacttcgtctctacaaaaaaaaaaaatacacaaaattagctgagcttggtggtgcatgcctgtgatcccagctactcgggaggctgaagcaggagaatcacttgaacctgggaggtggaggttgcagtgagtggagattgttccactgcattccagcctggggaacaaagtgagacttcatcccaaaaaaaaaaaaaaaaaaaaattcttattgcttctttcagtgatttcccttttttttttttctattctctcattctagaatgccttgtagctggatattgaagctttttgcttatctcatacattatttaatttacatcctttccagcacttttctttttaggctgaattctgtgaaacattccttggcttagtctttgagatctttcttctttttgaatttgagtagttactgctatgagttgccttcttttcactactttcactgtatctgtccattcaggctgctataacaaaataccatagactggtggttaataaacaacataaatttatttctccgagttctggagattaggtcaaagctcaaggtacagtcagattcagtgtcagatgagggcccttttcctggttcacagagagccatcttcttgaagtaaccaaatacagtagaagtggcatgaaatatctttggggtgtcttccatgaggggggtaatcccattctgcagagccctcatgacttcatcatgtcccaaaattcccagctcctaatacaatcactttgggagttaagatgtcaacatacgcaagttgaggagacaaaatttatttatttatttatttatttatttatttatttatttatttatttttgacatggagtctcactctgtcacccaggctggaatgcagtggtgtgatcttggctcactgcaagctctgcctcccaggttcacaccattctcctgcctcagcctcctggataactgggactacaggcacccagcaccacactgggctgattttttttttttttttaagtagagacagggtttcaccaccttagccaggatggtctcaatctcctgaccttgtgatccacccaccttggcctcccaaagtgctgggattacaggtgtgagccaccgtgcccagcctaggagacaaaatttagactacagcaacatctcataaattttggtatgccatgtctttgttttcatttgtctcaagatgttttctaatttaccttgtgaattcttgcttcacccattgatagatcaggagtgtgttgcttacaataaaatgtatttgtgaattttccagttttccttgtttttcatttcttgtttcattctatgtgacttgaaatggtactttgtgtttcagtcttttacatttcattaagatttgttttgtggcctaacacatggtttctcctggaaactattccacatatgcttgagaaaaatgtgttctcttctgttgtggggtgggttgtgccaactgttatatagtacttgtcctgtttccttcttgatattatcgtggctgttctacctattaaattgaaagtggtataatgaggtctccaattgttatgcagaattgtctatttttccctttaattttgccaatatttacttcatgtattttaagctctgatgtttgatacatataatttttttatcttcttgatgaattttaccttctatcagtatatactctcattcactctctcttctatcagttttttacttcaagtttactttgtctgatattaatatatccaggcaaattctctttaggttactatttacatggaatgatctttttccattatttaactttcaaccttttttgtctttagatctaaagcgaaggatggccaggcgtgatggctcatgcctgtaatcctagcactttgggaggctgaggtgagcagatcacctgaagtcaggagtttgagacagcctggtcaacatggcaaaaccctgtctctactaatactacaaaaattagctgggcatggtggtgggtgcctgtaatcctatctactcaggaggctgaggcagagagaatttctggaagccaggaggtgaaggttgcagtgagccgggatcttgccattgcactccagcctgggcgacagagcgagactctgtcttaaaaaaaaaaaaaaaaaaaaaaagcaaagggcaacatacagttggattgtgtattttaatccattttgccaaattatgccattagattggagaagttatcccatttacccttcatataattaccaataaaaaagactcattttgccactttgttactctttttctgtatgtcttacagctttttggtccctcatttcctacattactgccttttttgttgatttgtttttttagtgacatctttttttcgtctcattttgtgtatattccattgatattttatatgtagttaccatggggatttttttttctttttttgagatggagtatcactcttgttgcccaggctggagtccaatggtgcgatttcgagtcactgcaacctccacctcccaggttcaagcaatcctcctgcctcagcctctcaagtagctgggactacaggcatgcaccaccacacccagctaatttttgtatttttagtagagacggggtttcaccatgttagccaggctggtttcaatctcttgaccttgtgatccacacacctcagcctcccaaagtgctggaattagaagcatggcctggtgaccacggggattaaatataacatcctaacatccactgtacagtccactgtccagtcctcactcctcccacatgctgttcttactaaaatatagaaaaaattctactagggggaattttaaaagcaattaaacttttcaaccacagaaaatttactgtccatgacaagtcgtcatggacagtaagacacatagaaaggcaatctcattttcatgtcatttatttcaatttctcctctagtatgatcttgtgtacagtaacagtagtatctgaaagcttcccataactcctcagattcatagtttattcttccagtgagtattttcagaggcacttaaggaatatgtactgctaaaagtattaccaggccgggcgcggtggctcacgcctgtaatcccagcactttgggaggccgaagcgggcggatcacaaggtcaggagatcgagaccatcccggctaaaacggtgaaaccccgtctctactaaaaatacaaaaaattagccgggcgtagtggcgggcgcctgtagtcccagctacttgggaggctgaggcaggagaatggcgtgaacccgggaggcggagcttgcagtgagccgagatcccgccactgcactccagcctgggcgacagagcgagactccgtctcaaaaaaaaaaaaaaaaaaaaaaaaaaaaaaaaaagtattaccagattttttttttttttgagatggagttttgctctgtcacccaggctggagtgtagtggcaaaatcttggctcactgcaacctctgtctcctgggttcacacaattctcctgcctcagcctcccaagcaattgggattaaaggcacccgccaccatacttggctaatttttgtatttttagtagagatgaggtttaaccatgttggcaggctggtctcaaactcctgacctcaaatgatctgcccacctcggcctcctaaagtgctgggattacaagcatgagtcaccacgcccagcatattctcatattttcacattcatatagcttgtttgcagtgtgggttttcacaagtatagtaagacttgtaaaatggatgcaacatttccctcattctgtattatcaagatttctctccagtatgaattatcatttatattaaaggatgaaataatacatacgtgtgtgtatgtgtgtgtgcatatatatgtgtgtgtgtgtgtgtgtatatatatatatatatatatatatatatatatatatataaagacattcccatatttctaacattcataatgtttctggcctctttgagattaccaaatattaacacatgagacagaagtaaagatttcccacatcttaccttcatagagtttctctccaacgcatgttgactgacttagtaacactggaagaattcttaacacatcttaaattgatgaggtttcttatatctgaaactgtcagaaatttctgaaggctgtcccagatttcttacatatataggctatctgcccactgtgagttctttgatgttgagttattaaaaggcataagtgaagatcttgtagcctttacatttgtagggttttataccactgtgaattctcatgtagatattaagtcctgagcactaagtaaatgttttatcacattccttacatacagagggtttttctccagtgttgattatgaagtactatgaaggtttgtgaagtattttaaggctatctctcattcttaccttcaattggcttttacagtaatttttgttatgaaaaataaacaatatgctgggtgtggtggctcaagcctgtaatcccagtactttggaaggccaaggcgggcagatcatgagatcgggagatcgagaccatcctggctaacatggtgaaaccctgtctctactaaaaatacaaaaaattagctgggcatggtggcacatgcccgtagtcccagctactcgggaggctgaggtgggagaattccttgaacccaggaggcagaggttgcagtgggccaaggtcatgccactgtactccagcctgggtgagagagagagactctgtctcaaaaaaaaaaaagaaaaataaacaatagtggaagaaacaaaggctttaccacatgccttagaaccagatttttctcccaaaggtgagttcttacactttataagatgtgaagaattactactcttgcctattccttatatcactgggacttgtgtccatgttaaattcattcctattatataagatatggaaattcagtgaaggttgttcatattctttaccttcctatgatttttttccagatgagtttagatgtaaatactaagatctgaggaacacttcaggttttttcacatgccttagttcttagatgtttagcaagtgctgaagattgagtgaagtttttcccacatttcttacattcatatggttttgctccagtgtgagttcgtgtgtgaacgttaaggtatgtggaatacctgaaggctttcccacattctttacatgcataaggcttttctcctgtgtgcgttcgcatgtgcatattaagatttgtggaacgagcaaatgctttaccgcattccttacattcacaggccttttctccagtgtgagttcttaaatgggtactaaggcccgaggattgagtgaaagctttcccacattctttgcattcatatggcttctctccagtgtgaatccttacatgttgactaagcattgaggaattattaaaggctttcccacattctttacattcatagggcttttctccagtatgtgttctcatgtgtaaaacaagtcctgaggaacgagtaaaagctttcccacatgccttacataaatacagcttctctccactgtgaatccttacatgttttgtaaggtatgaggaatgaataaaagcttttccacactccttacattcatatggcttttctccagtgtgaattcgcatgtgtaaaataagtcctgtggatctagtgaaggcttttccacattccatacatacatagggcttctttccactgtggattcttgtatgatcagtaaggtatgaagaatgggtgaaggctttcccacactctttacatttatatggtttttctccactgtgagttctgatgtgtaatttaagtcctgtggattgagtgaaagctttaccacattctttacagacatagggcttctctccactgtgaattcttccatgtcctataaggtgtgaggaattactgaaggctttcccacattccttacatacatagtgtttgtctccattgtgagatcttatatgtaacttaagggatgactgattaagaaaagttctccaacagtctttgcattcacacaatttctcttgtgtgtgagttttattctgcctagtaagatttggaaactggttgaaggctttttcatgtttaacacacttaggcattttcccctcagcatgacttttcttgtaaaaactatgaggaaagttctttcttaaggcttttccactctgattatcctcagaagttttctctccaatgtgagttatcatgtgagtcataagaaatgggtgttcattgaagacttttccagaatggttagagtcatacagtttctctgcagtattgcttctctcctgttgagatataaaagatgaataaagaatttctcacattcagtatggtaacagaatttctccccaatcacaacatatatgcattggaaatatatttaaacattttaacatatccattatatgtacagagttccagccccatttttgagttaagttgagtaataggacaatgaggccaccagcctgcctatattctctgcattcacagagcttcttagacaatctgtctgatatttatttatttatttatttaagaaagattctcactctgtcacccaggctgaagtgcagtggcacgatcttgactcacagcaatctctgcctcccagttcaagggattctcaggcctcagcctcccaagtagctaggattacaggcatgtgccactatgcccagctaatttttgtatttttagtaaacacagatttttgccatgttgaccaggctagtctccaactcctggcctcaagtgatctgcccgctttggcctcccaaagtgctgggattacaggcattagccacaatacatctgagaattatttagactaaattatgggctgggcacagtggctcatgactgtaatcccagcactttgggaggccaaggcaggtggattgctttgagctcaggagtttgagaccagcctggacaaaatggtgaaaccccatctctacaaaaaaaaaaataatcagccaggcatggtggctcatgcctgtagtctcagctattcaggaggctgaggctggaggatcatttgagcccaggaaacagaggttgcagtgagccaagactgcaccattgcacaccagcctgagcaacagagtaagaccttgtctcaaaaataataataaagtaaaagaaattatgcacaaaaaactgaatagctgagttgtatgtttgtggatgtttatttgtgagatctctgagaagaaatatgtttgtagtaagtttagagtgcttcccatattcatgatattcagagaatctcttcagactttgttttctctgggtaaatgccattttcctcatataattttcatgaatattgtgcttcttgtcctagtgtggaagatttcatcccttggaaatcttaccaattgtactccatttggtgatctttctgcagaaatatcttgcagcagtggggagcctttggttttgagttgcaaatccaattctgaaataaagtgaaaaatgcagcttgggagaaaaattgtggaataaagtcgtttaaaagcctatggggctgggcgtggtggctcacacctgtaatcctagcacttttggaggcctagataggtggcttacctgaggttaggagttcaagaccagcctggccaacatggtgaaacactgtctctactaaaaatacaaaaaattagccaggtgcagtggtgcatgcctgtaatcccagctactcaggaggctgaggcaggagaatcacttgaacccagagggtggaggttgcggtgaggtgagatccaccactgcactccagcctgggctacagagcaagacttcgtctcaaaaaaaaaaaatgcctaaggaacagacatagcataatcaaatgtggcagagtgaagaactacagggctctttcctaccacaatatgactaataagttcagaaaacctatcagaatcaactgtgctgggctgggtgtggtggttcatgcctataatcccagcactttgggaggtcaaggtaggtggatcacttgagttcaggagttcgagaccagcccggccaacatggtgaagtgctgtctctactaaaaatacaaaaattggccagacatggtggtgtacacctgtaatcccagctactcaagtggctgagtcatgagaatcacttgaaaccaggaggcagaggttgcagtgagtcaagatcatgccattgcactccagcctgggtgacagagtgagactctgtgtcaaaaaagaaaaaaatatatatatacatatatatatagctaagtgaaagaagctagagagaaaaggttacattgtatgattccatttatataagatatacagaaagggtaaatccgtagagagagaaagcaaattagtctctgtagggtgagtggggactgactacttgatgggtatatggtttccttttggtgtgatggtaatgctttgaaactagaccaagcacactggctcatgcctgtaatcccaacactttgggagacggaggcaggtgggtcacttgaggtcaggagtttgagaccagcctggccaacatggtgaaactccatctctatcaaaaaacacaaaaattcaccaggcatggtggcgcacgcctgtagtcccaactactcagaaggctgaggcaggagaatcacttgaagccaggaagctgatggaggttgcagtgagccaagatggctccactggactctatcctgggcaacagagagagactctgtctcaaacaaacaaacaaacaaagaaatgccttgaaactaaaaagagctgatagctacacaacactaaaatggtaaatttttgtatattttacctaaaaaaagtatatggcacatttgtatatctttccaaacatgcataaaacatgattaaaaaaaaaaagagtgaagcaaatggaaagatggactataaagagtttggctatgtcagaagttttgcaatggtaaagatatggtgtcaaaactatcactacacctgtaatgccagcactttgggaggctgaggcaggtgaatcacaaggtcaggagttcgagaacagcctggccaacatagtgaaatcccatctctacaaaaatacaaaaaattagttgggcgtggtgtcaggtgcctgtaatcttagctacttgggaggctgaggcaggagaattgcttgaacccaggaggtggaggttgcagcaagccaagatcatgtcactgcacaccagccagggcgacagtgcaagactccatctcaaaaaaaaaaaaaacctgtattacttattatccaactaataatatgcagaaaactgaggctggtagtaagcaaaaagatgggagaatcaagaaagcaatataagaaggtgttggcaaaggacctacatgcataagatggaattttcaaataaggcagacaaacctttctgagaacagaaaagaggttgagaagatcaatggaaatttaaagatgaggggagttgaaagtatctaaggaaaccaaatggcctcagccttctcaggaagaagagtataccctgagaagttcgcaaagtaacatttccaatgtactgcatgtctcctagggtggcacagcagtgccataataccacatctgcttatgaactcaccctgcagaactcctgtcactcctgtcctcagctcttccatttgttccaatccagacatgagactacgtttgaataattcagaccctgctggagggaaaaatgcacaaaagaagaggcccatgcaagacataacaccatgtccttcaatggggaaccaatacttttgccttcggggattctaaagatggtcaagtgtaactttacaaatagcaaactaatcatataacatttccaatacatgcactaaaactatttttaaaataacaaaaatgttgcccaggtataatggctcatgcctcatacctcagcactttgggaagccaaggcagggagatcacttgaggttaggagttcaagaccagcctggccaacgtggtgaaacttcctctctactaaaaatacaaaaattagcagggcatgctggcacaggtctgtggtcccagctactcagaaggttgaggcagaagaattgcttgagcctggaaaaccaagtccaacttcatacacatttaaagtcttaaagtttttaatccatacattaaataaactcatttacttaaatctttattttcatggggaatcctctacaccaggggtgtccaatcttttggcttccgtgggccacactggaagaagaagaatggccttggaccacatataaaatacactaacactaacgatcgctgatgagctacaacaaataaacaaaaaaactggtctgtgcataaatctcataatgctttaagaaagtttacaagcttgttctataaagtaatgcccaggccatgcatggtggctcacgcctgtaatcctagcactttgggaggccaaagcaggtggatcacctgaggtcagagtttgagaccagcctggccaacatggtgaaaccctgtctccactaaaaatacaaaaattagatggccatggtggtgcacacctgtaatcccagctacctgggaggctgaggcaggagaatcacttgaatccaggagggggggctttgcagtaagcagagaccatgccactgcactccagcctgggcaatagagccagactgtgtctcaaaaaaaaaaaaaaaggaatgtccactggccaaggtccatgcctgtcttgcttattacagtaccctcatttgacagcaaacatttaagaaacattgatttcctaaaggggtcagtgaagaaatgatgccagttttacctagtataatgagattcttgtagttctccaacatcacatctctgtagagatctctctgggcttgatccaacaaagtccactcctcctgggtaaagtccacagccacatcctcaaaggtcactaagtgctaaaccattaaatacatgccagcttcagctaagtaccatctcctttgatgttctgagaaaaatgcatgaaggactaaggaagactagaagcctgcagtactcccaggcctcaggcctcttctcctctatatagatattgtcttgcaatggcatccaatcccatggacttatcagcatcactgaaacatgactaaactgatcttcctacagctttacaatgggctcttctggccttagtcctcctctatttataggtgcagtctgcactgaatatgttgcagcactatgtaaaatctaataacaaatgaattatctccacagtgacacacaaattccttcagattagacatctccatccctttcttacaatctgtcataacactcagcaaaacaatgagccaacaagcatgattgaggatcagaaagaattagtaaacattgagataaaataatcatttctgtagggagacccactgaaactattgctacagaataaaagatgaaatgctcctgattactgtaaatacaaaattgcatgcaggattgtgtaaagacaatgccaggttggactgccagaatgagccaacagcgtgtgatgtgcttccccctgcacagagcctatgaatggacgtgcagtcagggaggtttcacatcaccaagattcctatcccagaaaagcagatgttcatagctctgggaatggaatgcgacccttgtggagagcctataaacagatgcatggggggtgcctgtccatatggataaacgccctcatcttgtcacggctcttgtaggcctctttaaagttaaggcatactcccttctgagaacttctggtctaaccagttgtctagcttcacatcctgtttccatggattgtttctaaccagcatttgtggcaattgttactgctgattaatatcttgctaatcataggttatggaaagattgtgtttctgttttaaggctctgttagaaattactgacacacacactatattttaaattcttgtctctgtatactgtacttctacatacaaatgtactgtacttctacatacaaatgttatgttaaagaattacttcatccccatgtgaccatctcacctcataatcaaatgaccctaaatccctcactaacctacccccgccctcactaagcttaataataactgctggtatatccagtgcattgttggcactgtgggaccagaaggcggtgacccccctggacccagccttcactatcttgtgtgtgtctattatttctcaacctgccaatctgcctgggaacaaagagagagccccgttgcactgtgggctgctggccagatcccgcaatacacttccattgcaatctctgtacaacctgagatggcttggttcctagagaaattcacctggggagttatttcctgagcaggaccatcatttctttaagatgcttgaatacacgataacaaggtaaggctaccgatgatggctacaagcataacattttgaagttaggtctgctttccacttgcctgagaagaatccatcagtaatccatcagtaacccagccactagccttggcttctcgatgttcctgtcatgaagacagaaagtgtcctggaaaaaatgacctttggaaaagaataatggcatgtcagttggatacatcaaagaaaaagtatttcaggctaggcatggtggctcatgcctgtaatcccagcactttgggaggccaaggtaggcgaatcacttgaggtcaggagtttgagaccagcctggccaacagggtgaaaccctgtctctactaaaaatccaaaaaaaccagccaggtgtggtggtgcatgcctgtaatcctagctactcgggaggccgaggtgggggaatcacttgaacctgggaggtggagattgcggtgagccgacaccatgccactgcactccagcctggctgacagagtgcgactccatcttaaaaaacaaaaaagtaggccaggcacggtggctgacacctgtaatcccagcactttgggaggccgaggcgggtggatcacgaggttaggagatcgagaccatcctggctaacacagtgaaaccccgtctctactaaagctacaaaaaaattagctgggcatggcggcgtgtgcctgtagtcccagcagctggggaggctgaggaaacagaatagcatgaacccaggtggcagagtttgcagtgagccgagattgcaccactgcactccagcctgggtgacagagcaagactccatctcaaaacaaacaaacaaacaaacaaataaagcatttccataccctgcattgcagacatagtcttttccatggcatgcctcccaattgtaatactattctgacacttaatactctaattgtccagggggtggctcatgcctgtaatcctaaccctttgggaggttgaagtagaaggatgcttgaggccaggagttagagaccatcctgggcaatatagtgagaccaagtctctttattaaataaataaataaacaaataaatatacatatatatatatacacatatatgaaaacaaagaataaaagaaaaaatactctagttgactttgcctagcaactatcagacagtaagaatacttttgtgtctggcttctttcagtcagcattatgctggtgaggtgcacccaagttgttgtgttcatccacctgtgatttggttcatatctttgctgaagaatatgccacagaggctgggcatggtggctcacgcctgtaatcccggcactttgggaggccgaggtgggcagatcgcttgaggtcagcagttcaagatcagcctggtcaacatggtgaaaccccatctctactaaaaatacaaagaaaaatgggtggctcacacctgtaatcccagctactcgggaggctaaggcaagagaatcacttgaaccaggaagacagaaattacagtgagccaagattgcgccactgcactccagcctggtgacagagcaagactctgtcacaaaaaaaaaaaaaaaaagccacagaaatatgccacaattcacccattctgtggatccacatttgggttgttcctaatttaggctatttcaaataatgtgataaataacttttacatttagcctggcacacgtatgcatgttgcatcaccaagtccatatttagttgtcactgttttaaaatgtagctgggcatggtggctcacgcctgtaatcccagcactttgggaggccgaggtgagtggatcacaaggtcaagagatggagaccatcctggccaacatggtgaaacccatcctggccaacatggtgaaaccccatctctactaaaaatacaaaaattagctgggcatggtggcatgcacctgtagttccagctactcgggaggccaaggcaggagaagcacttgaacccgggaggtggaggttgcagtgagccgagatcatgccactgcactccagcctggcaacagagcaagactctgtctcaaaaaaaaaaaaaaaaaagtgttctcttcagcaatgcatgcacatcttaaagaagacttgatattgtcactgactttagttatgcttttatttatttatttttttttttgtagagatggggtctcactatgttgtcccagcttgtctcaaactcatagcttcagtggctcctcctgcttctgcttcccaaagtgctgggattacaggggtgagccactgtgcccggcctagttttatttatttatttatttatttagacggtgttttgctcttgttgcccaggctgtagtgcattgccacgatctcagctcaccacaacctctgcctcccgggttcaagcgattctcctgcctcagcctcccgagtagctaagattacaggcatgccccaccacacctggctaattttgtatttttagtagagacagggtttctccatgttggtcgggctggtctggaactcccaacctcaggtgaaccgcccacctcggcctcccaaagtgccaggattacaggtgtttaagttaccgcacccggccaatacacattgatctacacaagagatgcaaagaaacagaaaacatgcaaaatattaacaaatgatcagtctacaacaaggatatataataggtgttcaatattctggcctttcacattttctttggtttagaatattcaatctacagatagcctgggcaacaaaccaagaccctgtctttaaaacgtaaataaataaataaaaatatatgagggggaaggccaggcgcggtggcttatacctgtaattccagcactttgggagtccgaggagggtggatcacgaggtcaggagttcgagaccagcccaaccaacatggtgaaaccccgtctctactaaaaatgcaaaattagccgggcgtggtggcacatgcctgtaatcccagttactcagcatgctgaggcaggagaatcgcttggaccgggagacagagtttacagtgagcctatatcacgccattgcactccagcctgggcaataagagcgaaactccgtctcaaaatatgtatatatacgagaggaaaaacgctgaatcaaaacatgtctctttcacagttaatacaactgtaatttctgatactggtataatgaaggcggcatcctacttcctggaagcccctccgttttgaagctctttgggaggtactgacctaggaagttcagctgcttttgatctcaaaaacacagcggagtattgctactttgctttataactgtggcaatatttgcttttatttctataaacctacaactcctgcacacttgacaaagcatttaactgctgagcaatttcgcaaacttcaataagcgatgccctcccacagccagatcatctcctccgtccagggctcaccggaacgcactgcaatcgccctgtcggtgacaagaggacgctggggcccttttccacaacagctgagatgcttttccttctggagaaaggacacaaaggttgactggctgcttttaaacagaggggcacggtggttggagaaaaaaacacgtctccaccggggaccctgggccaggcccagactgatgcgggcgcagcgggaagaggcgctcagaagagaaggcgggaaccccccgcctcggggtcctggcggggaggaggcgccgcttctccggagcagcagcgggaggccggcgcgtctcagacctagcagaagtccggagcgtcaccctccgaccctcgctccgcctcccgctaggccctcctgccccgccctgcctaggttgagcatgagcgctggctgaggtgaaaacccagctaggaagctgctggagagcggggaatacgtatagctgcgcgccggctggcacttccgcttccggttgcgcacggcattaagtgtaggggccgagccccaagagctttggaatgaggatgatgtgaagctgagagaagagctggggccacctcttcgacacgcgtacagaaaagtcccgttttctcgcatcccaggtggaccaggatccagatcaatctgtcgatattgggaacgacgccggaccaggaaacccagcgccaagggccgggttggaggcggggactggcgcagcgggcggggcacgcgtggaggcgtcacctaaggcttcgattgcagacagcgggatgctcatcgagtgcttttcttttcttttttaatttctctttttagttttttgagataaggctccggtctgtcgcctaggctggagtgcagtggctcggtcatagatcattgcagcctggaattcctgcgctgaagctatcctcccgcctcggcctccggagtagcttggaccacagttgggcccatcacgcccagctaagttatctttttctagacacttgggtctcactgtgttccctaggctggtctcgaactcctgagcctaaaggatcctcccccctcggcctcccaagcagcttggaccacaggtgtgtgccaccacgcctggctaatttatttttattttatttttatttttttgtagagacagggtctctctttgttacccaggctgatctggaactcctgggctccagtgatccttccaccttggcctcccaaagtgctgggattataggcgtgagccaccaccctagggaaattcttttctgcaggattttctccttgtttcttcaaccctctgcagggatataaacatatttacaaagataatcccgctgtagtcctagctactgcgggagaatcgcttgagcccaggagttcgagaccagcgacaccctgtttgaaagattaacctgatggggctgggggcagtggctcacgcctgtaatcccagcactttgggaagccgaggcgggtggaacacgtgagttcaggagttcgagaccagcctggccaacatgccgaaaccccatctctactaaaaatattttttaaaaaatagccgggtgtggtggtgggcgcctgtaatcccagctactcgagaggctgaggcaggagaattgcttgaacctaggagactgaggttgcagtgagctgatacgatgccacagtactccagcctgggcgacagagtgagactccgtctcaaaaaaaaaaaaaaaaagattaacctgttaatccataaaatgctctgtgcctctgatacattcagttccttctttaggcctttagttttgttgtgatacaattatcatagcatacaattaacctgtttaaagtgtacagtttcgtggctttttgtatattcatatatttgtgcatcgatcatcacaatcaattttagaacattttcatgaccacaaaaataaacccagtaccctagccatgatcacccaatctgctcatccagccccacccccacccccagagtccaaagcaacagctaatctttctgtctgtatagattgcctactgtagatattgcctgtagaattagaatataaaacacgtggtgtttggcttgtttcattcaatgttttcaaggttcatccaattagcatgtatcagtacttaatttttttttactaaataagattccattgtatggctgtatcataacatcagttgttggatattgggttttctcttttttttttttttttggcttttttggataatacaagacgcattttaagcagtggtcaaaggaacattcatattcctaaacacttttgtcaataaaaataagaatagctgggtgcagtggctcacacctgtaatcccagcattttgggaggccgaggcaggcggatcacctgaggacaggagtttaagaccagcctggccaacatggtgaaacacggtctctactaaaaaatacaaaaaccagcagggcgtggtggtgcgcacctgtaatcccagcttctcgggaggctgaggcaggagaatcacttgaacctgggaggcggaggttgcagtgagctgagatggcgccacggcacttcagcctgggcaactgagcacaactgtctcaaaaaaataaaaaataaaaaataaatccccagctcaaaaaataaaacctagaaaaagaatataaatgtaaaccaaaatggaaaaaggtttatttatttatttattttttatttcaatagcctttgggaaacaggtggttttgggttacatggataagttctttagtggtgatttctgggattttggtgcacccatcatccgagcagtgtacaatgtacccaatgtgtagttttttatccacttttatccctcacccttctcccacccttcccccagagtccccaaagtgcattctttctttctatccttttttgttttgttttgttttttctttttgagatggagtctcattctgttgcccaggctggagtgtagtgacatgatcttggcaacctccgcctcccaggttcaagcagttctcttgcctcagcctcctgagtaagtgagattacagacatgcgccaccatgcttggctaatttttgtatttttagtagagatggggttttcccacgttggccaggctggtcttgaactgctggcctcaagtgatccacccacttcggcctcccaaagtgctgggataacaggcgtgagccactgcgcccacccaaagttcattatatcattcttatgcctttgcatcctcatagcttagttcccacttataagtgagaacatatatatggttttccattcctgagttacttcacttagaataatagtctctatccaggttgctcagaatgctatgactttcttgctttttatagctgagtggtattctgtggtgtatatataccacatttttgttatccccttattagttgatgggcattgagactggttccatatttttacagttgcaaattgtgggctgtaaacatgtgtgtgcaagtgtcctttttttttttcttttttgagatggagtctccactctgctgccaggctggagtgcagtggcctatcttggctcactgcaacctccgcctcctgggttcaaatgattctcctgcctcagcctcccaagtagctgagactacaggtgcacaccaccatgcccagctaatttttgtatttttagtagagacgaggtttcaccgtgttggtcaggatggtctcggtctcttgacctcgtgatccacccacctcagcctcccaaactgctgggaatacaggtgtgagccaccatgcccagcctgtttcagacatttttaagactatgtcccattcatttaaaatactatttttccccattgaattgttttgacacctttgtcaaccatcattagactgtaaatgtgagcttagatgttttaaatggagaattataccaaaccttccaagttcaaatattcccagtgctccataacttaagaacaatgaaaatgaagaaatacttcctaattccttttatgaagaaagtataacattgatataaaatgtggtagaggctgggcatggaggctcacacctgtaatcccagcactttgggaggccgaggtgagtgggtcacctgaggtcaggagtttgatactggcctggcaaacatgatgaaaccctgtctctactaaaaatacaaaaatcagccaggtgtggtggcacgcacctgtaatcacagctacttaggaggctgaggcaggagaatcgcttgaacccaggaggcagaggttgcagtgagctgagatcataccgttgcactccagtggtgacagagcaagactccgtctcagaaaaaaaaaaaaagtggtagagtacaaaaaatgaaaaattgcagaaccatatcaattatgaatatggattcaaatatgctgttagctattagcaaataaaatacaagaccacattaagaaaataactatccccacatgaaatttagcataaaacagcagtattagtgcagttattagaaaatccattaaatagtccaggtgcagtgccttatgcctgtaatatcagcactttgggaggctgaggtggaggttgcattgcccaagctcatgagttccagaccagcctgggcaacatgttgaaaccccatctctacaaaaaagacaaaaattagtcgtgtgtgatctcagctactcaggatgaagtgggaggattgcttgaacccaggaagtggaggctgcagtgaactaaaaccgaccatgcccctgcactctagcctgggtgatagagccagaccttgtctaaagaaaagaaaagaaaaaaaatccattaaataatgcaccataaaaatacatctacaagaacaagtcatgtgactttctccatagatgctgatgaagcctttggaaaaaattcaacactcatttattattattgttattattattgttgtttgagatagggtcttcctatgttgtgcaggctggatcaaactcctgggctcaagggatcctccttcctcagcctcctgagtagctggggctataggcgtgcaacaccacacccagtgcaatgtcccttattgatatcagcactccagaaaaatagaaattagtgaatactttcttaagatgattgcctgtacctatagctgagtgtgtgtgtgtgtctgtgtgtgtgtgtactggaagcattagctaatacaattcagtaagaaaaattaattttgaaacatagaattgcagctgggcacggtggctcacacctgtaatcccagcaatttgggaggccaaggtgggaggatcacctgaggtcaggagcttgagaccagcctggccaacatggtgaaatcccgtctctattaaaaatacaaaaattagccagacatggtggcatgctcctgtaatcccaactactcaggaggctgaggcaggagaatcacttgaacccggtaggtggaggttgcagtgagccgagattgcaccactgcacttcagcctgggcgacagagcgaaactccatctcaaaaaaagaaaaagaaaaagaaaaagtaaataagcatagaattgcaaaagaaggaaactatctctttttgcagatgatgtgatattatatatggaaagccctagagaataaaataataagttaacagaatgtgaaattgctatctaaaaaccaatggcattcatctaccagtcaaaagccagtaaggtgatgtaataaaacttatgtagaataacataaagatacttaggtttagacttatcaaaaaatgtgtaaaacatacatgaagaagctttaaaacaaacattcttgaaagacacaaaatagacttgaacaaatggaaaattccttgttcttctataagatgacttaacatcatatagatagcaattcttaacaggttaactcaaaaatataacaatcccaggccgggcgcagtgtcttatgcctgtaatcccagcactttgggaggctgaggcaggaggatcaggaggtcaggagatagagaccaccctggctaacacgatgaaacccagtctctactaaaaatacaaaaaattagccaggcgtggtggcaggtgcctgtagtcccagctactcgggaggctgaggcaggagaatggcgtgaacccgggaggtggagcttgcagtgaactgagattgcgccactgcactccagcctgggcaacagagcaagactccgtctcaaaaaaaaaaaaaaaataccaaatccaagatggcggccagcaggaggctgattaagagcttgaggaaatctgcaaatgtgggatgaaaaacttcccgtaacatccaggttgatgaagctaatttattgacttagcaagggcttattgttcctgacaactctccatatgattaggtgaccttcagaatcgaaatcaactttccagcagagtatccattcaaactaccaaagatcacatttaaaacaaagatctatcacccaaatatcgacgaaaaggggcaggtctgtctgtcagtaattagtgctgaaaactggaagccagcaaccaaaaccgaccaagtaatccagtccctcatagcactggtgaatgacccccagcccgagcacccgcttcgggctgacctagctgaagaatactctaaggaccgtaaaaaattctgtaagaatgctgaagagtttacaaagaaatatggggaaagtgacctgtggactaaaatctgccacgattggttccagcaagtgtaagcagaggccccatgcagtgcattcagacacccggcaaagcaggactctgtggaaattgacacgtgccaccgcctgacattcacttgtggcagttactaactttctacagttttcttagtgaaaaatggtgtaggtaatctgtaaagaaaggattaaaatctaagatgttttaaatatatatacatatatatgtgtatatatatgtgtgtgtgtgtgtgtgtgtatatatatataacaatcccaataaaaaaccaaactttttaatggagttttgtaaattaattttaaagttcacatgggagcacaaacgtctgataatacccaagaaaactctgaaaaacaaaagtgacaatgccctacagatattaagacatactataaagcctctacaattaaaactgtggataggaacaggaacaggaaacagacaaatgggataaaatggaatatctagaaatagatccaggaacatatgggaattcagttcagaaaggtggtatttcagatcaattggggcaaaaatgcagtttgcaatgaaaggtgctaagattaagtggttagccatctggaaaaagacaaaattacatggataactcacaccattcacaaaataaactccaaatgaatcagggaactaaatgtgaaaaacaaaaatatatgcatatgtagggtatttgaatgatttttgggtgattaacgtaaaatatgtgaccacaaggcagcagtagctcacttgggcagtgctttgatgggtttgtgtgtggggtcccttgtgggcagcaagccacccaggtgctgaagcaagagaccgaggacacgagctgttccagtataataaaacataaaacaagaatagttgtaccagatatagatcatagacatgattatatatgaatatcattaatcattagtttgtggcaattactctttattccaatattataataatccttgctctataatcataacctaggaaaaatcaggctatacagagataggagctgaggggacatagtgaggagtgaccagaagacaagagtgcaagccttctgttatgcccagacagggccaccagaagggctccttggtctagcggtaatgccagcgtctgggaagacgtccattgccaggtggaccatggtctagcggtagcgaaaactgtcaaggaacaacacccgctacttagcagactgagaaagggagtctccttttccccgggggggtttatagaagactctgctcctccacctcttgtggagggcctgacatcagccaggcttgcccactgttatctggaggcccaaccgtctccctgtgatgctgtgcttcagtggtcacactcctagtccgccttcatgttccatcctgtacacctggctctgccttctagatagcagtagtaaattagtgaaagtactaaaagtctctgatatgcagaaataatggcataagctgtctttctctctgtctcctctccctctctgcctcaactgccaggcagggaagggccccctgtccagtggacacgtgacccacgtgaccttacctatcattggagatgactcacactctttaccctgccccttttgctttgtatccagtaaataacagcgcagccagacatttggggccactaccggtctccgtgcattgggggtagcggtcccccaggcccagctgtcttttcttctatctcttagtcttgtgtctttatttctacactctcttgtcgccacacacagggagaagcccaccgaccctgtggggctggtccctgcagtccctcatagcatgagaatatccaaaggctacagacttggaggtcactactcagaatgggaggagagcaagagaactccagggaaagaatgggagttgagagggagcttatgtgctaggtgaagttgcttagcagcctagtgggaagtttctaaatcagaaagctctgaagagcagcaagggattggggtcctttttatagctggagggtttatcttctctgtggtcatcaaatggttggcacaatttcaccggggtatgcagagcaggcaggccctaaaggactaaaaaatctgcttgtttggactatgtttaaaacaattgattcaggatcattaaaaaaaagaagaagaagaacgaaagaaaacacacacacacgcacacacacacacacacacacacacacaattggatggccaagcatggtggcttgcacctgtaatcccagctacttgggaggtcaaggcaggaggattgcttgaacccaggagtttcaggctgcaataagctgtgatcctgccactgcactccagcctgggcaacaaatcaagaccctatctttaaacaaacaaaccaaaagaaaattaaaaacaattgggtgtggaaaaacttgagtttggagccgggtgcggtggctcatgcctgtaatcccagcacttttggaggtcgaggtgggcagatcacgaggtcaggagatcgagaccatcctggccaacctggtgaaatcccgtctctactaaaaatacaaaaattagctgggcgtggtggcatgtgcctgtaatcccagctacttgggaggctgaggcaggagaatcccttgaaccagggagtcggaggttgcagtgagcccagatcgtgccactgcattccagcctggcaacaaagtgagactctgtccaaaaaaaaaaatttaaacaattggatgtggaaaaacttgagtttggggccaggtgcgatggttcatacctgtcattttagcactttgggaggccaaggtgggtggatcacctgaggtcaggagtctgagaccaagctagctaacatggcaaaaccccatctctactaaaaaatacaaaaaaaaagccagactaaaacttgagtttgacactggcagctattgtgagtaacggtgctatgaacactggtgtacaaaccaaaacaatacagaaaaaacccagcaaacactggacaaaggagagaatcagctttccagagttacagtattatcagattcaaatgtccagtttttaacaaaaatctcaaggcacacaaacaggaaagtatggcccattcaaagaaaaaataaataaatataaattttccctggaagagacctaatggtatatctactagacaaggactttaaaacaactgccttaaagatgttcaaagaactaaaggaagacatggaaaaactcaagaaaatgatgtatgaacagaatataaataacaatcaagagatagaaaacctaaaaagaaaccaagaagaaattctggagctaaaaaatacaataattaaaatgaaaaattcactacagggattcaaaggagatttcagctgttgcatcccagacctctccatggatgatgtcaaaggcatccccagtagtgacaaccaaaaatgtctccagacattgctaactgtcccccaggagtaaaatcatccccattggaaatcactgctctagacctacctcccaatttacagaaaatgcaggtgacagaaaaacaagctaaaagaaaccatgagggggccgggcactgtggctcaggcctataatcccagcactttgggaggccaaggcggatggatcacctgaggtcaggagtttgagaccagcctggctaacatggtgaaaccctgtttctactaaaaatacaaaacagccaggtgaggtggcatgtgcctgtaatcccagctactgaggaggctgagacgggagaattgcttgaacccaggaggcagaggttgcagtgagctgagatcatgccattgcagtgcagcttgggcaacaagagcgaaaactcgtctcaaaaaaaaaaaaaaaaaaaaaaaagacgcaaggtctcgctatgttgcccaggctggattccaactcctgggctcaatccatcctcccaactcagcctccccagtagctgggactacaggtgttagccaccatgccctatcttcaaagtttaatactatgctagtatataagaaaactgatactttataacccaatgttgaaacaatattcctctggaatcagactgcctgagattgaatctaggcttaaactctctgtgcataatatttttcatttgtaaaatgagggttagattaatatccactttctagctctgagggtaaatagttgaatagaatgctcatgtgagacgatttaactctgacatttcagccaactgtagcttcggggtgtcaccttgaaaagaggttggttcctttggaagaaatgttacttccagaagttagaataaaaggaatttatttatttatttatttatttttgagactgagtttcactcttgttgcccaggctggagtgtaataacacgatcatggcttaccgcaacctccgcctcccgggttcaagcgattctcctgcctcagcctcccaagtagctgggattacaggcatgcgccaccacgcctggctaattttatatttttagtagagacagggtttctccatgttggtcaggctggtctcaaactcccgacctcaggtgatctgtctgcctcagcttcccaaagtgctgggattacaggcatgagccactgcaccccaccagaattttttttttttttttgaggccaagtttcactcttgttgcccaggctagagtgtaatggcgtgatctcagctcactgcagcttctgcctcccaggttcaaggaattctcctgcctcagcctcccaagcagctgggattacaggtgcccaccaccacacccagctaattttttgtattgttagtagagacgaggtttcaccatgttggccaggctggtctcgaactcctgaccttcaggtgatccacccacctccaactcccaaagtgctaggattacaagcatgagtcaccacgcccggccatcacgacttttttttttttttagataggctgtcactcctgtcactcaggctggagtgtagtacagtgatcttcactcactgcagccttgacctcctggtctcaagagatcctcccacctcagcctctcaagtagctaggactacaaatgcatgccaccatgcccagctaattttgtttttttttttgtttttttttttgtagagatgaggtctcactatattgcccagcctggtctcaaactcctgggctcaagcaatccccctacctcagcctcttaagtgctggaattataggcatgagccactgcacctggccactctttttttctttctgtttaaagacagggtcttgctatatagcccaggctggagtggagtggtcattcacaggcatgatcatgtacactgcagcttacaactcccaggctcaagtgatcctcccgccccagcctccccaataactaggactacaggcatgtgccaccacacccagcaagtttcccttagttctctgaaatgttttaagactccactcaaatcttcttaaacagtcttaaattttcatcatgatattacctagtgatttttttttttaagatggagccttgctctatcacccaggatggagtgcagtggtgtgatctcagctcactgcaacctctgcctcccaggttcaagcgattctcctgcctcagtctcccgagtagctgggactacaggtgtgcaccatcatgcccggctaatttttgtattttagtagaggtagggtttcaccatgttggctaggctggtcttgaactcctgacctcaagtgatccacctgcctcagcctcccaaaatgctgggattacaggtgtgagccactgcactcagcctgacctagtgatgttttactcccagttctaatgttccacagttagagactccagacataccaaaatcagttaactttcatgaattcaccatggcccttatgcagtagttttcaacagtggctgcacattagattcactggaggacttttaaaaacactgatacccatgacacatccccataaatgctgttttaattggtctgaggtaggactcagcccttagtacatttctcaagtttccaggacattctataaggattaggttgagaattactgacttggcttctgcattcatatgctcttcttgtccacttgatatagtcctacacatctttcagaacttaagtcaaccttgcctcctctggagaaaatatcctgttaggtgtttttttgtttgtttgtttgttttgagatggaatctccctctgtagcccagtggcggatcttggctcactgcaacctctgcctcccaggtccaagcgaattctcctgccccagcctcctgagtagctggaattacaggcatgcaccaccacgccctgtaatttttgtatttttaggagagatggggtttcaccatgttggccaggctggtcttgaactcctgacctcaagtgatctgcccacattggcctcccaaagtgctggatttacaggtatgggccaccatgtcccacccactgttaggtgcactcttatccctcccctcccagcaccccatagcccctttgaaattcctttattataagtcttgtcataacgctttatcacttgcgctgtttatctttcatgctgtctgatgaactccaggaaagtagaaactaattttagtctagacacctgcttgtggaagttaggcaaacagtcttctgaaagactgtcttgatataaaatcccagatcccacaaaaaaaaacttttttctttacagcaaagcaagtggaaaaaacaaaaacaaaaacaaaaccctttattttttaattgctctatcaatgaaaaagaaaatagagaaatttcccaagggcaaacaattttttttttttttttttgagatggagtgtcgctcttgttgcccaggctggagtgcaatggtgcgatcttgactcactacaacctccgcctccgggttcaagggattctcctgtctcagcctcccaagtagctgggattacaggtgcacatcaccatgccctgctaattttgtatttttagtagagatggggtttcaccatgttggccaagctggtctcgaactcctgactccagatgatccacccacctcagcctcccaaagtgctgggattacatgtgtgagccaccgcacccggcctaataatttttttaagttagcagaatccagagatagaagaactttccctcaatatttttcttcccttccagaatacagagtgattgctgaaaaatagctgccccaccaggaatggcactagcccttgtgactagtttttaccacaaaatgttaaaggaaaaaaatgtgtcgtgttagccaaagagcaatgtgctttctcttttttattagacagggtctcaatctctcacccaggctagagtgcagtggtgctgcacagctcactgcagcctcaaacttctgggctcaagcaatcctccagcctcagcctcccacgtagctggaacttcaggtgtgcaccaccacacctaatttttaattttttgttccagagatggggtcttgctaggttgcccaggcttgtctccaactcctggtctcaggcagtcctcccgactcagcctcccaaagcactgggattgcaggcatgagtcaccatgcccagccagctttctctatttttactttccctttccacctagatgtacatggtgtctcaacattgaaagatactgggtttctgcaccaccaggggaagaaagccaactaaatttagattgttacatgagtaggaaattaactgaaactttgatatgtgtctgttacattaggttacccataaatacacagctagatggaaaagaaatgttactgggatataattttggttaaataggacaccatatgcatttgaaaggaacaaatggctttcctcaacttcctttaactctctcaaaatgcacacctgtggctctttctagatcttctacctcttcaagcactccatacataacactatctccctgtaacttttttttttttaagagacagggtcttgctctgtcacccaggatggagtgcagtagcatgatcatggctcactgcagccttgacctcccaggctcaagcaatcctcccacctcaacctccccagtagcagggaccatagatgtatgccaccatgcctggctgatttttaaatttttttgtaaagatgggtttttactatcttgcccaggctgctcttgatcacttgagccaccccttggcctcccaaagtgctgaaatacagacctgagtacctggacttctccctataattcttttttttttttttttttttttttttttgagatggagtctagctttctgtcacctgggctggagtgcagtagcacgatctcagctcactgcaacctccaactcccaagttcaagcgattctcctgcctcagcctccctagtagctgggattacagacccgcatcaccatgcctagctaattttgtatttttagtagagacagggtttcgccatgttggccaggagttcaaggctgcagtgtgctatgattgccactatgaatagccactgccctccagcctgggcaacatagtgagagtctcatcactaaaaaaaaaaaaaaaaaaatatatatatatatatatatattctttaaaagtttattttgtataaataataatgagacataatttcaccaggctggtctccaactcctgagctcaagtgctgggattacaggtgtgagtcaccgtgtccggccagttttgtttttgtttttttttttaatttcagacagggtcttactctgtcgcctggatggagtacagtggcacaatcactgttcaccaccacctcaacctcccaagctcaggtgatcctcccacctcagccccccaagtagttggaactacaggcacagtgccactatgcttggctaatttttatttttatttatttttatttttgtagataccgggttttgccatattgtccagactggtcttgaacttctgagctcaagcgatctgcccgcttcggcctcccaaagtgttgggactgcaggcactagccatcgcgcctggccagataatggtgattttttttcctaaagaaaaaaagtccaggcccatgtagatttttttcgtattgaagggggcctgcccctccacacctgttggtatttctcgcaaggtggagacaagagactgagaaaaggaaataagacacaaagtatagaggaagaaaagtgggcccaggagacgggtgctcagcaagtgaggatctgcaccggcactggtctctgagttccctcagtatttattgatcactttctctactatctgggcaagggggatgtggcaggactatagggtaatggtagggagagggtcagcaggaaaatgtgagcaaaggacgctatgtcacaaataagtttaaggaacggtgctgtgcctggatgtgcatgtaggccagatttatgtttcactttacacaaacatctcagtgcagtattgccgccagcatgtctcacctccagccataaggcggttttctcctatctcagtaaatagaatgtgcaatcgggttttacaccaagacattccattcccagggatgagcaggagacagatgctttcctcttatctcaactgcaaagaggccttcctctttcactaatcctcctcagcacagaccctttacgggtgtcaggctgggggacagtaaggtctttcccttcccacaaggccatatctcaggctgtctcagtggggggaaaccttggacaatacccgggctttcttgggcagaggtgcctgcggccttccacagtgcactgtgtccctgggtaaccgagaatggagcatggcgatgccttttaccaagcatactgcctgcaaacacatttttaacaaagcacatcctgcacagccctaaatccattaaaccttgagtcaacacagcacatgtttttgcaagcacagggttggggctaaggttacagattaacagcatctcaaagcagaagaatttttctaagtacagatcaaaatggagtttcttgtgtcttcctttttctacatagacacagtaacagtctgatctctcttttccccacaagtaacagtctgatctctctttcttttcccccgcacatatactgacctaaccataagaagtcagtgagactgggaaatatgcatcattgatgcagcctcacaataccccggccccatctgttctctcactactgagaccccaccctgtctcccccttcaccgagatttttttttttttttttttttgagacggagtctcgctctatcaccaggctggagtggcccgatctcggctcactgcaacttccgcctcccaggttcaagcgattctcctgcctcagcctccccagtagctgggactacaggcgcctgccagcatgcccagctaatttttgtatttttagtagagatggggtttcaccatgttggccagtatggtcttaatcgattgccctcgtgatccgcctgcgtcagcctcccagtctgtcccctcaccactactctctttcacggagaccccacccccatctctcccttcaccgactccccgcccccgtctctcgctcacggagtccccgcccctgtctcaaccaagaccgagtccccgcccccatctctccctcgccgagtcgccgcccgcgtctctccctcacccagaccccgccccatctctccctcaccgagaccccgccccatctccccctcaccgagactccgcccccgtctctccctcacccagaccccgcccccatctccctctcaccgagtccccgcccccatctctccctcaccaagaccttgcccccatctccccctcaccgaggctccgcccccgtctcaccctcaccgagaccccacccccatctcgcccttcacccagtccccgctcccatctctccctcaccgagaccccgcccccgtctgcctccctccgggtggctaagccgcacctgaagccgcacctggtcgcagaggctactgctggggaaaccgttgggccagcggcggctaaagggcaggaggcgccgctgtggccacgcgcacttctgattccgctccagggtttcagaaggaactgagggctctggacccggcctcggaggcctgaggagttgggaggggcggcggccgcgtcctccgcaactctggggagaagtcttagtttccgcgcagccaaacgcgattggaccccgccctccggcttcactggggaccgtgggggcggaacccggcgggaggacgtatggggggctggaccatgatggagggagtcggttgggctggacctcgaaatgcctctgctcgctttcctctgcgcttatgccgccatgtacgagtatgcgctgtttccaggtggtttgttatacagcagtagataactgatacatcccttttcactaatatttttatttcctaatacaatttttaaataattttttattttataccaaaaataatagtgaagagggtttttttaaggtcaggatctccctctgttgcccaggctggagtgagtggcgcaatcatggctcccgcccccgtctgtccctcaccgggtgcccgcccccatgtccccctcaccgagaccctcaccactgcagcctccaacccctgggctaaagtgaccctccggcctcaattcctctagtaggtgggactacaggctcgtgacaccacagcaggctaattttttgtggagatagcggttgcactatattgcccaggttggtcttgaactcctgggctcaagggattctcctacctcaacctcccagtttgtaatcagtcttcaaagtgttgggattacagacgtgagccaccgctccaggcctggtttttccacatggattatgtacatgtggcttctcaccacgttgagtcgatgcctgtcaattaagggataactaatcaactgaagactttgtcactcttattgcactcatagggattctcccccatggaaagtctgtcttgacaagcaagcaagtgcattgctacattagaagctgctgccatttaggttgggtgtggtggctcatgcctataatcccagcacatttggaggccgaagtgggcggatcagttgtggtcaggagtttgagaccagcatggccaacatggtgaaaactcatctctactaaaaatgcaaagattagccgggcgtggtggtatatgcctgtaatcccagctacttgggaggctgatgtgggagaatcgcctgaacccgggaggagaagattgcaggagccgagatcatgccactgcaacccagcctgggtgacagagcaagacgcgagactctgtcgcaaaaaaaaaaaaaaaattgctgccattttcagagcacctagactgcttctgccttgtctgaattccttcaaattgagtacgatgaatgctttgccataggttccattatagtcatgacattcataaggcttttcatacacagatattttattctgatagtcatctaaacaaaaactgaattctgtgtaaatattcaacatgcgagtctcatttatggacgacgtgcctacttgtgagacctctctgtgagtaagcatattttgaataggtttagaatgttccccaagttcatgaaactcagaaactctctcctgaagggtggcttctcttgggcatagacaaggagaaccttgtctccaggttcttcccattgtggggtggctcttccatctcatggcctccctgactcgtgctgcggagaaccggcaatcatcctcctgcatcttactctcttccggccagcagattgttttccccaactttattccgctttgcagctatctttttggtgctacatggtcttctggtctgaaatgaattgggaaaagaagtaaatcaggtttttgtttttgtttttgttttttgttttttgtttttgagacagagtcttgctctgtcgccaggctggagtgcagtggcgcgatctcggctcactgcaaccgactcccaggttcaagcaattctcctgcctcagcctcccaaatagctgggactacaggcgcgtgccaccacgaccagataattttttgtatttttagtagagaccaggttttaccatgttggccagcatgttctccatctcctgacctcatgatccgtcggcctcagcctcccagagcgctgggattacaggtgtgagccacctcgcctgaccatcagtttgttttttgtttgtttttttgagacagtgtctcactctgtcacccaggctggagtgcagtggtgcgatcacaactcactacagcctcaaactcctgggctcaagttatcgtcctgctgcagcctcccagtgctgggagtacaggtatgagtcactgtgccaggccttcaaaatttatgtttttggataaaaaatgatgacataatggtgctttgttttgttttgtttttgacacaagatctagctttgtcacccaagctggagtgcagtgacgtgatcatggctcaatgcagcttcgacttcctgggctcagaggatcctcccacctcagccccccaagtagctggaactacagttgcacaccaccatgcccggctaatttttgtatttttggtagagacggggtttcaccatgttgcccaggctagtctggaacttctgagctcaagcgatccgcccgcctcggcctcacaaagtgctgggattacaggagtgagccactgcatccagctcgataatggtgatttttttttaagatttttttttttttttgagacagagtttcactcttcttgcccaggctggagagcaatggtgtgatcttggctcactgcaacctccgcctcccatgttcaagcgattttccttcctcagccgcccgagaagctgggattactgacatgtgtcaccacacttggctaattttgtattttcagtagagacggggtttctccatgttggccaggctagtcttgaactcccaccctcaggtgatccgcccacctcggcctcccaaagtgctggtattacaggcatgagccaccgcacccagctaagaatttttgtttttttaagaataagaaaaaagactccgtctgaaaaaaaaaaaaggaaagaaaaaaataaagtccaggcccatgtagattttttcatatactgacctaaacataagaagtcagtgagactgggaaatatgcatcattgcaatatgcagcctcacaatatctggccctcatctctccctcactgagaccccgcccccgtctctcacctcatcgagaacccgcgctcatccttctctgagaacccgcccccatctctccatcaccaagaccctgcctccgtctgtcccctcgatgactctgctctgcccacccctcaccgagatctaacctctgtctgtcccctcaccgagtgaagggggcctccccctccacacctctgggtatttctcgtcaggtgggatgagaggctgagaaaagaaataagacacagagacaaagtatggagaaagaacagtgggcccaggggacctgcaccgctggctgtctctgagtttcctcggtatttactgatcattatttttactatcttagtgaggggagtgtagcagggcaacaggtggggagaaggtcagcagggaaacatgtgagcaaaggaatctgtatcacgaataagttcaaggaaaggtactgtgcctggatgtgcacgtaggcctgatttaagtttcactttacacaaacatctcagtgtagcaaagagtaacagagcagtattgctgccagcatatcccgcctctagtcacagggcagttttctcctatctcagaattgaacgaatgggaatggtcagtttacacggagacattccattcccaggaaggagcaggagagagaagccttcctcttatctcaactgcaaagaggcctccctctttcactactcctcctcagcacagaccctttaggggtgtcaggctgggggatggtaaggtctttcctttcccatgaggccatatctcaggccatctcagagctttcttgggcagaggtccctgcggctttccgcagtgcattgtgtccctggttaatcgagaatggagaatggcgatgacttttaccaagcatactgcctgcaaacatactgttaacaaggcatcctgcacagccctaagtccattaaactttgattcaatacagcacatgtttctgtgagcacagggttggggctaaagttaagactcacagcatctcaaagcaaaacaatgtttcttaatacagatcaaagtggaatttatgtcttccttttctacatagacatagtaacaatctgatctctctttcttttccccacaactgagtcccgggctccatctcctggtagagtccagccctacagggctttgcgggtgttctccccatgtgtggagatgagagatcataagaaataaagacacaagacaaagagataaagagaagacagctgggccctgaggaccactgccaccaagacgcagagaccagtagtggccccaaatggcggatgcactgatatttattgtatataagacaagggggcagggtaaggagggtgagtcatccaagtgattgataaggtcaagcaagtcacgtgatcataggacagggggcccttcccttataggtagctgaagaagagagggaagacagcatacatcagcattttctttttttttttttttttttcccccgagacagagtctcactctgtcaccaggctgtagtgcaatggcccgatctcagctcactgcaacctccgccctccgagttcaagcgattctcctgcctcagcctcccaagtagctgggattacaggcgcctgccactgcacccagctaattttttgtatttttagtggagatggggtttcaccttcttggccaggctggtcttgaagtcctgacctcgtgatccacccgcctcggcctcccaaagtgctgggattacaggcatgagccactgcgcccggcccagtgttttcttttacgcacttatcagaaagataaaagactttaagactttcactatttcttctaccactatcttctaagaaattcaaagaggaaccaggagtaccggaggaatatgaaagtggacaagaaaagtgaccactgaagcacagcaccacagggaggggtttatgcctccggatggctgcgggcaggcctggataatatccaacctcccacaagaagctggtggagcagagtgttccctgactcctccaaggaaagggagactccctttcatggtctgctaagtaacgggtgccttcccaggcactggcattaccgcttgaccaaggagccctcaagcggcccttatgcgggcctgacagagggctcacctcttgctttcttggtcacttctcacaatgtcccttcagcacctgatcctacacccgcccgttattccttggttatgttagtaatacaacaaagagtaatattaaaagctaatgattaataatgttcatactaatgattgataatgtccatgatcatctctatatctaatttataactattcttattctaactgttttctttattatactgaaacagtttgtgccttcagtctcttgcctgggcacctgggtaatcctccgcccacagactcccgcatcactgagtcccggtcctcctatcctacacggagtctctaccttcatctccacactcagggagactccacctcggtctccgccttcactgaatccccgcccccattgcgccttcactgagacaccagccccatctacgctcacagagaccttaccccgtctccccgtcaccgagaccgctcccccatctcgccctcaccaagtccccgcccccgcctcgccctcaccgagtccccatccctgtctctcccccactgagaccccgcccccgtctcgccctcatcgagtctccgcccccgtcctccgtcatcgagtctccgccccgcctcgccctcaccgagtccccgcccccgcctccccctcactgagtccccatccctgcctctcccttactgagaccccgccctcgtctctcccctcacggagaccccgcccccgactccccctcatcgagtacccgccccgtctatccttcatcaagtctccacccccgcctctccctcaccgagtccccgcccccgcctccccctcaccgagttcccatccctgtctctcccctcaccgagaccccgcccccgcctctccctcatcgagtccccgccaccgtctctccttcatcgagtcccctacccttcccgtcatcgagtccccggccccgtctccccctcatcgagtccccgccctcttctctcccttcactgagatcccgccctcttctctcccctcactgaggtcccgcctctgacagcccctcaccgagtccccgccccccgtctctccctcaccgagttctcgtcccagtctccccatcacctaatccccacccctgtctctcccttacgaagtccccggcccccggttcccctcaccgagaccctgccctgtctgtcatcgagtccctgtctccccctcacctagtccctcttctctcccctcaccgagtccccgcccccgtcgtccgctcaccaagtccccgcccccgtctccccctcaccgagtcccgccctcttctcttccctcaccgagtccccgcccccgtcgtcccctcaccgattcccgcccccgtctccccgtcaccgagtccccgcccccgtctctcccctcaccgattccccgcctccgtctcccctcaccgattcccgcccctgtctctccctcaccgagtccccgcccccgtcaatcctctcaccgagtccccgcctccgtctcccctcaccaagtctccgcccccgtctctcggtcaccaagaccccacccccgtctccccctcaccgagtccctgcccgggtcttcctgcctccacgtggcgaagccgcacctgaagccccacctggtcgcaaaggctggtgcaggggaaaccgttggttcagctgcggttcctgggaagggggtgccgctctgatcacgcgcacttctgattcccctctcggggctcggaagcggctgagggctctggacccggtctccgaggcgtgaggcggtgggagggtcggcggccgcgtcctccacgaccctggggagaagtcccagtttccgcgcagccgacaacggttggaccccgtccctccggcttcactgggcaccgtgggggcagaacccggcggcggcttggggtgggggcgggaccacgatggagggagtctgttgggcgggacctcgaaatgcctctgctcgctttcctctgcattcatgcggcttgtacgaggatgcgctgtttcctggtggtttgttatacggcagtagataactgatacatctctcttcactactttgtttgcgtttttataggtcagggtcttcctctgtcgcacaggctggagtgcagtggctcgatcacggctcacggaaacctccaatccctgggctcaagcgatcttccctcaaattcaacagtagctggaactacaggctcgtgacaccacagcaggctaatttttaaatttttcgtggagatgggaggtcacactatattgcccaggctggtcgcgaactcctgagctcaagcgatcttccctctttggcgtcccaaagagctgagattgcaggtatgaaccaccgcaccgggcccattctcaacatctctcaacaaactgataaagagcatgtaaaaaaatctacagctaacattgtagtgaaatactgaaaactgttctaagctcaggagtacagcaacgatgcccactctcacgaattctatcaagcattgtagttacggccacgcgcggctcacgcctgagatcctaacactttggaaggaagatcgctttgagttcaggagtttgagaccagcctgggcaagatggcaaaaccctgtctcaattttaaaaaatacaaaaattagccaggcatggtgatgcatgtctatagtcccagctacttcggagactgacacaggaggatcacttgagcccggaggcagaggttgtagtgagctgagatggcaacattgcactccagctggggcgacagaggaaggccctgtctgaaaaagaaattggaagaaacattatctacatttcttttctgccattatttacagacaacataattgtctaagtgggagatccaaaagaatctaaattgttacacataatgtgcgggttagcaagaatagtggctaaaaactcaatatgcaaagataattgtcttgtctctctctttttttttttttttttttttttttgacggagtcttgctctgtcgcccaggctggaatgcagtggcttgatcttggcttgctgcaacctccacctccctggttcaagcgattctcctgcctcaggcccctgagtagctgggattacaggcgcatgccaccacgcccagctaatttttgtatgtttttagtagagacggggcttcgccacgttggcaaggccggtctggaactcctgacctcaggtattccgctggcctcggcatcccaaagtgctgggattacaggcgtgaggcaccgcacccggccgacttgtctcttttaacagcaatattacaacagcaataaaataagtagaaataaatacaacaaaaaagtatgcaatatctcttccgagaaatttgtaaactactattgaaagaaatcaaagatgacctagatcaatggatagaccttccttgttgatggattagaagtttcaatataaagacttgaattcttcttacttaatatagaaagttaacaagttttcagtcaaaataacatgtttgatgaggaacctgatctacttataataaaatgtatgtatgtggaggtacaaaatactcctgaagaactgttggcacttaccctacagacattaagaaatagaaagacagggtcgggcacggtggcttacgcctgtaatcccaacactttgggaggccgaggcgggcggttcaccaggtcaggagatcgagaccatcctggctgacacggtgaaaccccgtctctactaaaaatacaaaaaatagccgggcgtggtggcaggcacctgtggtcccagctactcaggaggctgaggcaggagaatggcatgaacccgggaggtggagcttgcagtgagcagagatcgtgccactgcactccagcctgggcgacagagcgagactccgtcgcaaaaaaaaagacagtaatattggtgtagtggtaaataaattaaaccaataaatagaatagaaagccccaaaatacacccttatgaatgaggtgtgttcttggccattatgaataatgctgctataaacgtgggtggtcaaatatctttttgagagcctgttttccattcttttagatatatacccagaagtgggattgctagaccatgtgataataccaattttaattttttgaaccactgccatactggttttcatagctgctgcaccgttttatagtctcactaacagtgcacaggtgggccaggtgtgctggttttcatgcctgtaatcccagcactttgggaggctgaggtggatggatcacctgaattcaggaggtcaggaccagcctggctacatggtgaaaccctgtgtctattaaaaatacaaaagaattagctgggtgtgttgagtcccagctacttgggagactaaggcaggagaatcgcttgaacccaggaggtggaggttgcagtgagccgagatctcgccagtgcactccagcctgggcaacagagcaagactctgtctcaaaaaaaaaaaaaaaaaaaaaaaaaaaaagaattcacaacacaatgactgtgttaacaatgttgttgaagttcatcctaagtttggtaattggggtggccatttgtgttaactaattgcctttatccaaatgaaaaataaaaattcttatatccttttggcaagcaggcagttttagcttataagcaggtgcctaaggaaatagaagtgtgctactgatgcaggtaagtgccatcattggggattcacccaggaaagaattcaactggtggtgctacacaaggatctttcattcactcagagttgctttttccagagtacagctaaaacctatgcagtgtgcccagaatcagcattttgtgctgttggctagctatagttatactcacttttaattacatgcaaattaaggggtgtgccatgcagaactttctagaaaggaggctataacttccaggtgattgttgtggaagtgaatggtaactttcatgttgttgccatggtacttatcaactgtcatggctctggtaggagtgtcttaccctaacaagcaaggagagcaactagagatggcttttggtgccatctgctggttcccggtggcttcttcactttatcctgttgggaccaggaaacaaagtaagtcctacccagtctcctacctcactatggtctgaaggttgtatgttgtgtgtgtcctgcctccacaccaccactccgcaaagccaaatgcttaaatcctaaccgcagaagtgatgaaattaggatatgaggccttagggaggtgattagatcatgagggcggggccttcgttaatggatttactagcaagtttgtccaagtcgccttattttgttgttgttgtcttgttttgttttgttttagacttgtagcagcctgaagccatggtttttagtttctgtttctagtgataagtggaaaagagggatgaggaagaggctttgcaggcccaaccagaaacaaaaactaacaacccataactgtattcttgaacacccctgtatgggattggccgtggagactttctcaccccttctatcatgtgattatgaggtatgaggtaggaaatgtctttgtgtttaaggagggactgttctgaacgtccatgctgattcccactgaagacgttaaactctagagtctgtgggaaaaggaagaagcttaattgaatgtctttcttttttctttcttttttttttttttttttttgaagctgagtctcactctgttgcccaggctggagtgcagtggcgcgatctcggctcactgcaacctccacctccgggttcaagtgattctccttcctcagcctcccgagtagctgggattacaggtgcatgccaccacacctggctaattttttatttttagtagagatggagtttcaccatgttggccaggctggtctcaaactcctgacctcatgtgatctgcccgtctcagcctcccaaagtgctgggattacaggggtgagccaccgcgcacgacctgaatgtctttttttttttttttttgagacggagtctcactctgtcacccaggctggagtgcagtggcgcgatatcggctcactgcaacctccgcctcccaggttcaagcgattctcctgcctgagcctcccgagtagctgggactacatgcacctgccaccacgcccagctaatcttttgtgttttgtttttagtagagacggggtttcactgtgttagccaggatggtctcgatctgctcacctcgtgatccacccgcctcggtctcccaaagtgctgggattacaggcgtgagccaccgcgcctagctgaatgtctttcttacgagccctgggtactgggcttgaaaccacctttgcaaaaattataactgagaaactgattacagggaaagagatctgaccaaactaactgcatcttgcttctaacctccacactgtccttgttcattcctggacataggccaaactaagtttgggatgaacttagtttatagtttaactttgaaacaaaaacaacaataatgctttcccaaaacaaacctccttttccctggagactagactgcctttgcaggactaacacattagccacagataaggaattatggtttaggagtcatgcagctggtgggtgcaatattctggacctccccaaattgctcctggggataaaatcactatcgtaaaacctagaatcagtgcttgagatattttgcagaccctgtgtttcagtgcacaagttgaggccacctagatggataaaccggctcatctggtcttgtggttcccacccaggaactgactcagagcaacaggacaggttccactccctgtgatttcatctcagactcaaccaatcagcacttcccactttcagaccccctattatccttaaaattatctcaaattatccttaaaaaccacgatctcaggccaggtgcggtggatcacgcctgtaatcccagcacattgggaggccaaggcaggtggatcacctgaggtcaggagttcaagaccagcctggccaacatggtgaaaccccgtctctactaaaaaaaacaaatagaaaaattagccaggcgtggtggcggccacctgtaatcccagctactcgggaggctgaggcaggagaatctcttaaacccaggaggaagaggttacagtgagctgaggtggcgccattacactctagcttgggtgacaagagcgaaactctgtctcaaaacaaacaaacaaaccccctgatcccagagttttcagggagactgatctgaataatagtaaaattttggtctcctgtacggctagctggctctgcatgaatgaaactctttctttattgcaatttcctgtattggtaaatcagctctaggcagttaggcggttacaagcttggtaactcatgcctataatcccacactttgggagcccacggcaggaggatcgattgaggccaggagttagagccaagcttgggcaacatagtgacatcccatctctacaaaaagaaaaaaaaatagctgactgtggtggtgggcgcctgtagtcccagctactgaggaggctgaggtggaagaatcacctgagtccaggagttccatgctgcggtgagctatgattgtgccattgcacaccagtctgggtgacagagtgagactgtctctaaaaaaaaggaaaaaaaaagaaagaaaatccatcagcagatagctcttggatctaccttcactttagcctcagaccatgccacaacccctctgttctcccctgctaccaactttccaaaccactttcttctcatcgggattattgccttaactttccaattacgctccctgattctacctttgattcccaagagttgtacaaatgacagacagatattcttaaaatatatatcagataatattgctccagtagctcagacccttctatgactttgcattgcactcatagtaaaacccaaaatgtttagttgttctcatggccccatatgatctgactgataattgacttccttcctgctagtctccatcctacccaactcacttaaaccatttcagacacagggcttctgctgttacagaagcattgtcctgccttcctgcctcagggcccttgcacttgctgttctgtctttcctcagaaattgacagacatcccctaaattccttcagtcatttcctggagatgaagtggaaatactgtgtgtagatgactctgagtcccagttttctcatctgtcaaactgttgttccatccccatcccagcttggaaaaggcttttttttttttttttttttttttttgctggccccttgctctgttgcccagactggagtgcagtggcacgatctcagatcactgcaacttgaaccctcgtgagttcaagcaattcttatgcctcagccacaggaatagctgagattacaggcgagcaccaccacaccagctaatttttgtactttttttttttttgagattgagttttgctcttgttgcccaggctggagtgcaatggcactatctcggctcactgcaacctctgcctcctgggttcaggcgattctcctgcctcagcctcccaagtagctgggattacaggggcccaccaacacacctggcaaattttttgtatttttagtagagatggggtttcttttttttttttttttttttttttttgagatggagtttcactttgtcgcccaggctggagtgcagtggcgcgatctcggctcactgcaagctccgcctcccaggttcacaccactctcctgcctcagcttcctgagtagctgggactacaggcgcccgccaccacgcccaggtaatttttttgtatttttagtacagacgggatttcactgtgttagccaggatggtctcaatctcctgacctcgtgatccgagcaccttggcctcccaaagtgctgggattacaggcgtgagtcactgcacccggccaagatggggttttatcatgttgaccaggctggtcttgaactcctgacctcaggtgatccacctgcctcagcctcccaaagtgctaggattataggtgtgagccactgtgcccagccaattttcgtacttttagtagagacgaggtttgaccatgtttgccaggctggtctggaactcctgacttcaggttatccgtccacctcagcctcccaaagtgctgggattacaggtatgatgaaaatgctttttcaagtgataactttccaatagggaaggaaggtttaaaggtaagtttcaaaaagcacctgcttgagatgaaatgtaataccataggtctccagaagacaacagcgcatcacttggtttgccttataaatccttaattctcaaaacacaggaattaagagaaacagcgaacatttgtagacctcttcacccttcgttagggggaaagtgaaaataactatttgctgggcatctcttgttcttttctatttttattattttaattgatgtcccattccaggatgttgggcatctattgtttcatctggacactattttatatctgtgatctactttatttatttattttcctttttttttttttaagagacggagtctccctctgttacccaggctggagtgcagtggtgtgatcttgattcactgcaaactccgccttccgagttcaagcaattctcctgccacagcctcccgactagctgggattacaagcacgcaccactatgcccggataactttttgtatttttagtagaaacgaggtttcaccgtgttagccaggctggtctcgaacccttgacatcaagtgatccgtccgcctcggcctcccaaagtgctgggattacaggcgtgagccaccgtgcccggcctattcatttttcttttttctatttctttttttttttatatagagaaggagtctcagtctgtcacccaggctggagtgcagtggcgccatctcggctcactgcaacctccgcctcccaggttgaagcgattctcctgcctcagcctcccgagtagctgggattacaggtgtgcaccaccacgcgcagctaatttttgtattttattgggtttttggtttgttttgtttcgtttgagacagagttttgctcttgtcgcccaggctggagtgcaatggcaccatctcggctcactgcaacctccgcctcccggattcaagctattctggtgcctcagcctcccaagtagttgggattacaggcgcccgccaccacgcccaactaattttttgtatttttagtataagcgggtttcacaatattgttcaggctggtctcgagctcctgacctcaggtgatccacccgcctcggcctcccaaagtgctgggattacaggcttgagccatcgcgcccgggctatttatttttctttttttaattttaattttaatgtttcatagagacagggtctccccatgttgcccaggctggtctagaactcctgggctcaaaggaccctgcctcaacctcccaaagtgccaggattacaggtgtgagcgactgcgtctggcctacatttgtgatttaaatcagcacatttctcatctctcagaactcctcaataaccatcggttggaaaaaagagcaaaaaacctaaatgtatttatatgtaatctctaggagttaacctcaccgaaagatacaaccgatttaagaagaaaatgttaaaactctcttcaagggcctatagaagaaacgggatgaatggaaacgtgattcactctgtggactggcagatacctctggaaatctggtgttctattgtaataagttctcgggaaggtagagacttttatttgggacatagaggcttggccaaccagaatggaggacccacccaagtcccgcccccaagcctgagccctctcctttgctccacccactctgcctgaagtcccctcaacccctccgacttcgcagtctcccagcccggccttctggggctggtcttcattggaagccacgcccccaggtctgtcggataaacattttacaacctattctctctgaagtctagtacctggaggcttcctctggaaataagaacttgggtctcccgcctggccaacatgacgaaaccccgtctctactagaaatacaaaaattagccggtcgtggtggcacacacctgtaatcctagctactcaggaggctgcggcaggagaattgctggaacccggtaggcgcaggttacagtgagctgaggtcgtgccactgcactccagcctgggcgacagagcgagactgcgtctccgaaaaaaaaaaaaaaaaaaattagccgggcatggtggcgggcgcctgtaatcccagctattctggtggctgagccaggagaatcgcttgaacccgggaggtggaggttgcagtgagccgagatggtgccattgcactccaggctgggcaacaagagcgagactccatctcaaaaaagaaaaaagaaaaaaaaaaaaaagaacttgggtctccacaacctcaagcctcctctcaaaaaaagaaaaaaagttttaatctccctataagctggaatccccactcccaccccaccccagctcccggtttgagctgtcctgccattctggaacaaatgaatgtatttcttttcctttttttttttttttttttttgagacggtgtctcgctctgtcacccaggctggagtgcagtggtgccatctccgctcactgcaacctccgcctccctggttcaagcgattctcctgcctcagcctcctgagtagctgggataactggcgcgtgccaccacacccggctaattttgtatttttagtagagacggggtttcaccatcttggttaggctggtctcgaactctgacctcatgtgatccgcccacctcggcctaccaaagggctgggattacaggcgtgagccaccgcgcccggccaatatatttcttaaatgtatttgattgaagtctcatgtctccctaaaatgtacaaaaccaactgcaccccagtcaccttgggcacatgttctcctggcctcctgagggctgtatcaccggccatggtcactcatatttggctcagaatgaatctcttaaaatattttacagagtttgacgcttttcgtcgacattgcttaggctggcatcgaattcctgggctcaagctgtaattgccggagggttcttcctgcccactgcataaagaaagacaatggcattgtagtaaaggaagagtttagtggacatgaggctggccatgccacgtgggagtcgaagttcctactcaaatcatctcaaagctcctaggttaggggttttccaaagacagtttgggggaacgggtggggatggcagagtaacaggtgcttgctgctgattggttggggcagatgcaatcataggggggtcgaagccttcctcctacaggctgaatcgattttgggtggggccataggagcagggttgacgggtccatgaggagtgttaggtgtcagacatgcaataaaacctgaaagggtatctccaaaggccaatctggggttctgcaatagtggtgttatttgcaggagtaattggggaagttgcatatctcataacctctggaatagtggctgacatacatttctgcgcctttgcaggaatcaggctcctctcctgctgatggctccccattagttttaccaaagcgattgagttttaggcaaagcttattatcacctaaactatagcctaaatgtttcttaaagttacctcagcccaatagcccaggaaatattaagggaaagggaagatggggggtggattggctcagatctctttcactgtcataattttctgatatatatttttttgagacagggtctcactctgttacccaggctagagtgcagaggtgcaatcacagctcactgcagcctcgacctccccaggctcaaatgacctgcccattctggagttcattcagcctcacaaaatgttggaattacaggcgtgagccacctcgactgtcctgattattatttttgcaaaggcaatggttgacaaagagtcaaactctgtaaaatatttgaagagatttattctgagccaaatatgagtgaccatggcccacgacacagccctcaggatgtcctgagaacatgtgacaaaagtggttggggtgcagcttggttttatatattttagggagacatgagacatcaatcaaacacatttaataaatacattggcttggtccagaaaagcaggacaactcaaagcaggaagcttccacgctataggtaaatttaaactttttttttttttttttttttgagatggagtttcgctcttgttgcccaggctggagtgcaatggtgtgaactcggctcaccgcaacctccgcctcccaggtgcaggcgattctcctgcctcagcctcccgagtagctgggattacagacatgtgccaccacgtccggctaattttgtatttttagtagagacggggtttctccatgttggtcaggctggtctcgaactcccgacctcaggtgatccgcctgcctctgcctcccagtgttgggattacaggcgtgagccaccgcgctcggccatatgtgcaatttattacatgttaattatacctcagtgaagctgtaggggctgggcatggtgagtagttcacacctgtaatcccagcactttgggaggctgtggcaggcagatcgcttgagcccaaaactttgagaccagcctgggcaatatggtgagaccccatctctacaaaaaaagaaaaattagctgggcatggtggcatgtgcctatagtcccaggtacttgtgtggctgagagggtaaggaacactacagccctggaggtcaaggctgagatgagccatgatgcgctctggcctgggcaacaaagcaagaccctgtctcgaaaaaaaattttttctttttttcctaaagaatgtgtaggccaagttaaccctccagacaggtaagaatgtgatatgtgtcatagcctgtaatttatacaataacatcaaggctgctttggtccaagggcaggatctatggcgagtatatgttcttacacaagaacagtaaataaagtagaaatcctggctgggtgcagtggctcatgcctgtaatcccggcactttgggaggccaaggtgggcggatggcttgagcccaagagttcaagaccagcctgggcaacatgacgaaaccctatgtcttaaaacaaaaaacaaaaaaaaacaaaaaaccaccaggcatggtagtgtgcacctgtagtctcaattacttgggaggctgaggtgggaggattgcttcaacccaggtgagggaggttacagtgagtcgagattgggccagtgcactccagcctgagggacagaataagactctgtctcaaaaaaaaaaaaaaaaaagtaggtggggcacagtggctcatgcctgtaatcccagcactttgggaggccaaggtgggtggatcacctgaggtcaggagtttgagaccagcctgaccaacatggtgataccccatttctattaaatacaaaaaattagctgggtatggtggtgggcacctgtaatcccagctactcagaaggctgtggcaggaatctcttgaaccttgggggcagaggttgcagtgagctaagattgcaccattgcactccaacctgggctacaaaaacaaaaactccgtctcaaaaaaaaaaaaaaatctagaaatgttggagttgttctcaggacttgggttaagcagaagtcaagatggcagttggcatccaagatggagtcatgattgccttcacagcccctaatagggcccagttactgggcctcccttcagatactattgcatggcagcatggcagctttatatcctgggcaagattgtggagtaaaattactcaggttctactttaccagctatgttgctttgggcaacttaacttctctgtgcctcagtgtcttcatctctacctccctcagtgggctgcttataggagtccatgcatgaaggactgagcacagtgcctgccacataagaagcactcagtaggctgggtgtggtggctcacgcctgtaatctcaccacttcgggaggctgaggcaggaggatcgcttgagccaagcagtttgagaccaacctgggcaacacagtgagaccacgtctttacaaaataataataataataattctttttaaaaattagccaggtgtggtggtgcatgcctgtattcccagctgctggggaggatgaggtgggaagattgcttgaacccaggagttcgaggctgcagtgagctacagtcacaccactgcactccagcttgggtgatggagtaagaccatgtctcaaaataaataaataaaaataaaataataatgtcagctattgtgattatgctttgccttcattggagggcagtcctgaagcccccagccccttatctgggagaaggcaatgattaggggtggggaggttccaaaaggggagaagctctgtctgatgtcccatcaccccatcaccccttggggcaaggcccatgttagaggtcactaaggcagaatgaattctccatagggtaagcccaggaagaagacacctgtaaccagtggtatgccacagctcaggagagccaaatgctgaatcttcaactattttgtgagccagttgttaaactgttggtagcttgaaaccagctgtggtgagacagtgtttacaccatagtaatctgcaaatgctacagatcagggccttcttcccccacctgctagcactgcctgtaaacacttacctgcttcaaaattaatgcctgctggccagttgcagcggctcacacctgtaatcccagcactttgggacgctaaagcaggcggatcacttaaggccaggagtttgagaccagcctggccaacatggtgaaaccccatctcctaaaaatataaaaattggctgggtgtggtggcatgtgcctgtaatcccaggtactcaggaggctgaggcaggctgcagcataaaccttggaggcagaggttgcagtgagctgagatcgcaccattgcactccagcttaggtgacagagtgagactagcatctccaaaaaacaaacaaaaaaactaaaacgaatgcctgctgctccctcccttccaactggaaaggcagagaggaaaaagaaaggaagcttttttgccctagagttgttccaggttggggcatcggcaatgcacttccagaaccacctgcagagtccagcacagggctggtgttgagtcaccctcatgttctcccaaactgaccccagctctccagacactctctgcaagcaaaacaaacctcatttccctccttgttcccacaggctctgagacttcaccaatctctgtttctacctggttcaacccagccccctgatgtcctgggctggagctgctggggtggtcacagcattggacaatcagaccttgactagggccacatcaggggcacactcatagcctagtcctcatgtggccagatggagaaggaatttcaggtgaggtggctcatgcctgtaatcccagtattttgggaggccaaggcaggaggatcatttgcactcaggagttagagaccagcctgggcaacacagtgagacccccatctctacaaaaaataaaaagtagctaggtgtggtggcacattcctgtggtcccagctacttgggaggctgaagtaggatggcttgagcccaggagttcgagaccagtcttggcaacatagggagactcctgtctctgtctgtctacctgtctgtctatctatctatctatatttatttttgaaacagagtctctctctgttgcccaggctggagtacagtggcacaatctcggctctctgcaacctcctatctatctatctatatttatttttgaaacagagtctctctctgttgcccagactggagtgcagtggtacaatctcggctctctgcaacctcccactccagggttcaagcgattctcctgcctcagcctcctgagtagctgggattataggcatgtgccaccaagtccagctaatctttgtatttttagtagagacggggtttcaccatgttggccaggctggtctcgaactcctgacctcagatgatcctcccgccttggtgtcccaaagtgctgggattacaggcatgggacacaccgtgcctggccccatctctatttaaaaaaaaaaaaaaaaaaaaaaaaaaggttgggcgcagtggctcacacctgtaatcccagcactttgggaggccaaggtgggcagatcacaaggtcaggagtttgagaccagcctgaccaatatggtgaaactccaactctactaaaaatacaaaaattagccaggcatggtggcacacgcctgtattcccagctacttaggaggctgaggcaggagaatcatttgatcctgggaggcagaggttgcagtgagctaagattgcaccactgcaccactccagcctgggcaacagatcaagactccgtttcaaaaaaaaaaaaaaaagagagacagaaagagaaggaatttctactgcaactctgagtgggaagagcatgggaggaacatctctggctcttctctgatgggtaagcttggaataagaaaccaagtgtacccagctcagctctcttctccaacctggctctaagcaccagaggaggcacctgggcctgctgagcaggtggtgaacccacagagccggggcttagccacacacagcaacgctcatctcacgggtaggcactcacacttataatctgacacctgcatctttcaagtggttcagactcgaaaggcaggaaaaggtggtgttacttactgaacccctaaagcctgagccacctgcaaggccctgcccactcctgtccccattatctccttttgttttattttttttttttttgagacagggtctcactctgtcacccagtctggagtgcagtggtgatcacagttcactgcaacctccgagtcccaggcttaagcaatcctcccacctcagcctcctgaatagctgggataccagctgggtagatgcacaccaccacacctggctaattttttctgtagagacagggtttcaccatgttgcccaagctggtctcaaactcctgaactcaaagtgattcacttgcctcagatgtcccaggttggccttaaactcctgggctcaagtgatccacccacctcagcctcccaaagtgctgggtttacacatgtgagccaccatgcccggccctgacctcaacttcgacagctcttacccctgctcactctgccacacaaccttctttctgtttctggaaaatgccaagttcattctcatcttagcagtgctggcctttcctcttctgccctagctcttctgatctttgctttctcttcacctctcagatctcagcacagaggcctaccgtgctcactcaaccatgcaagtatgcctccatcacgtgaccctggtgtactggctcagagtctccaaaattacaacatggtggccgagcgcagtggctcacacctgtaattccagcactttgggaggccgaggtgagcagatcacgaggtcaggagtttgagaccagcctgaccaacatggtgaaaccccatctctactaaagatacaaaaattagctgggcgtggtggcgggtgcctgtaatcccagctacttgggaggctgaggcaggagaatcacttgaacccgggagacggaggttgcagtgagccaagatcgcaccactgcactccagcctgggtgacagagtgagactctgtccccacacaaaaaaactaaagcatggactggcttacctgtttgttgtcctgtcttctcctctatgagatctacgagggcagggtcttgtcagttttgttcactgtggtggcccagtttcccagaacctagaacagtgcctgcaaaatagcagaagctcaagaaagattggttgaatgaataaactgaatacttctcgggaaaaaaaaatgatttttttctttaatagtaaaataatatacgtcttggaaaatacagcatacaaaatacagaaaatataattgagcacttttatgagcatatcgatcattgaatcgcgagtctgcatcgcctatctctccgcgtctcttgcgtgcgtgtaggtatataaatggtgtataggcttgtgggtgtgcatgcatagacagtccttcttgggtactcataagggggctcagaccctcaggtgcccctgagtcttaaccccaccccttcttcatccgtcctgttcctgaagacgaccatgaaggtgactcttcattgagagcctctggaggctgggagcttttagagtaaggctttgcaatgtaaccgtgaggtagctatgatcatccttatttccagatgtgggaactaggcttcccagaggctgatgatatgaccaaggccacacagctggcaaacagtgattccaatggtctggaggtccctaggcctctgttctctcaacctggggctttcagtttcctcaagtctgattatctgccctcttcaaggtgctgctcagagggtctggggctcaatgatgaaaactgggatgggtcccaagggcaggtggagtagttacatccaccagtccatagactctttggggcaagccctgacgatgaccatacagtggggcagccccttacacaggatcttctccgcctcctgaccctcccaccccagcccctgcagctcaaggactctgagcttgggcatagtgaggcaggaggagaggatttcagtgggggagggcatttctggggtgacgaggggaccctgcaggcacagactctccagggccggcattccctccagcacagccaggccaggggcagagaggcccctcacggtcagccggatcttgcgcacatctcggaggtggcggctgatggccagcagggtgctgtcggcagacagggtgcagcccagcacctcaagcctctgcagatagctgagctcctgcaggccagcatccagccctgtctcggtcacacggtaggtaccacccagcaccagcgagcgcaaggcccggaagcgcgtcaggccctgcaggtgctcgtcacggaaggcggggacgcggtccagcacgatgcattcaagcaggggcagcacggtggggtcctgctgcttgtggagccaggccatggagatctcgcagctgtgcagctccagggtcctcaaggtgctgggcaggctggtgatgggcaccatgctcaggtcggccacgtgcaggcagaggcgcttcaggttggggcacttctggcccagggctctcaacagagcaggggacaactggggggcctgggagccagagaacaggtagccacccatccgcagggaatggagccgggatgccatgtaccttcgaaggaggtgccacatgactttaggtcgcatctgtaagagccagagattggggtgacagagtgagaggtatggagcttccaaggcccctgctgggctggagacacacaaccccggggtgggggattctggtgccctgctgggcttctgcccttgcctagccagtctcctccccaggttcaacctccccaggttcaaccagatggtttgagtgcaccatcttgcctgctagggctttgaacaaatctttttttttttttttttttctgagacaggttcttgctctgtcacccagtctacagtgcagtggtgagataatggctcactgcagcctggacctcctaggctcaagtgattctcccacttcagcttcccaagtggctgggacttctgacacatgcccagctaatttttgtgatttttagtagagatgaggtcttgctatgttgcccaggctggtctccaactcctggattcaagcaatcctcccatctcagcccctcaaagtgctgggtctacagtcgtgagccactgcactcggccacttagaataaatctggtaggggctgggcacagtggctcatgcctgtaatcccagcactttgggaggctgaggtggatggatcatttgaggtcaggagtttaataccagcctggccaacatggtgaaaccatgtttctactaaaaatacaaaaattagctgggcgtggtggcaagcacctgtaatcccagctactcaagaggctgaggcaagagaatcacttgaacccaggagacaaaggttgcagtgagtcgatatcgcaccactgcactccagcctgggcgatagagtgagactctgtctcaaaaaaaaaaaaaaaaaaaaaaaaagataaatctggtaggggaaaaaaagatactaacagaatctatctttagcaataaatttttaccgttttttctggactaagaaaaagagcagagcaacccattgatattttacccctttcttaatgatcacctccagtagaaataagcaacacagaataaaattttaaaagccgaaaactacccagagtaaattaggtctatgttaaaaaaaaaaaaaaaaaaacaacaaatgaaaaggctgggcacggtggctcacacctgtaatcccagcactttgggaggccaaggcgggcagatcacctgaggtcaggagttcaagaccagcctgaccaacatggagaaaccccgtctctactaaaaatacaaaattagccaggtgtggtggtgcacgcctgtaatcccagctacttgggaggctgaggcaggagaatcacttgaacctgggaagcagaggctgcgatgagccaagatcgtgccgttgcaccagcctgggcaacaagagcgaaactccatgtcaaaaaaaaaaatatatcaaagcctggtagagtggaagctgcaaaaatcaaccctgggaagttagacttagtagaaaataaaaaatatatataattgatagcactgggcatttcattctaagtacagtttatcttaaaaagaaaaagttagcatgcttacatctgccttttattgctggatttctctacttggcatcatagggcctaatggaaaaaggaaaattgtctaataacatattctttatgtgtgcttacaaaggtgtttcttttcttttctttttttttgagacggagttttgcttgttgcccaggctggagtgcaatggcacgatctcagtcaccgcaacctccgcctcctgggttcaagcgattctcgtgccttagcctcctgagtagctgggattacaggcatgtgccaccatgcccggctaatttttttttttttttttgagacagagtctcgctctgttgcccaggctggagtgcagtagcgcaatctcggctcactgcaatctccacctcccaggttcaagcaattctcctgcttcagcctcccaagtagctggtactacaggcgtatgccaccatgcccggctatgttttttttgtatttttagtagagacgcggtttcaccatgttagccaggatggtctcaatctcctgacctcgtgatccaaccaccttggcctcccaaggtgctgggattacaggcatgagccacgcgcctggccttaattttgtatttttagtagagacagggtttctccatgtaggtcaggctggtctcaaacacccgacctcaagtgatctgtccacctcggcctcccaaagtgctgggattacaggcatgagccactgcacccggccaaaaaggtgtttctacatcaaactcttccattcactgaagaaaatagcttatcatcaatccttcagaaagcatgcttacatttgccttttatacatgcatatatatacccatgtaatacaaactgtattagtctattttcatgctgctgataaaaacatacctgagactgggaagaaaaagaggtttaattggacttacagttccacatggctggggaggcctcaaaatcatggcaggaggtgaaaggcacttcttacatggcggcagcaagagaaaatgagaaagaagcccgggcgcagtggctcatgcccataatcccagcactttggaaggccgatgcgggcggatcacgaggtcaggagattgagaccatcctggccaacatgacaaaaccccgtttctactaaaatacaaaaaaaaattagccgagtgtggtggtgcatgcctgtagtcccagctactaaggaggctgaggtaggagaatcgcttgaacacgggaggcagaggttccagtgaactgagatcgcaccactgcactccagcctggtggcagaacaagactccgactcaaagaaaaataaataaattaatttaaaaaatacaaaaaattagctcagtgtggtggcacgtgcctgtagtcccagcttctcaggaggctgaggcaggggaatcacttgaacccaggaggcagaggttgcagtgagctgagatcataccactgcactccagcctggcaacagagcaagactccatctcaaaaaaaaaaaaaaaaaaaaaattaagaaaacgagaacaaagcaaaaatggaaacccctgataaacccatcagatctcttgagatttattcactatcacgagaatagcatgggaaagaccagcccccaagattcaattatttcccctgggtccctctcacaacacatgggaattctgggaaatacaattcaagttgagatttgggtggggacacagccaaactatatcattccaccccggcccctccaagtctcatgtcttcacatttcacaaccaatcatggcttcccaacagtcttccaaagtcttaactcatttcagcattaacccaaaagtccacagtccaaagtctcatctgagacaaggcaagtcccttccacctatgagcctataaaatcaaaagctagctagttacttcctagatacaatgtgagtacaggtattgggtaaatgcagccattccaaatgggagaaattggccaaaacaaaggggttacagggcccatgcaagtctgaaatccagtggggcagtcaaattttaaagctccaaaattatctcctttgattccaggtctcacaaccaggtcacactgatgcaagaggtgggttcccatggtcttggccagctccgccccttgtggctttacagggtacagcctccctcccagctgctttcacaggctggtgttgagtgtctgaagcttttccaggtgcatggtgcaagctgtgggtggatctaccattctggagtctggagaacagtggccctcttctcacagctccactaggcagtgacccaatagggactctgtgtgggggctctgaccccacatttcccttccacactgccctagcagaggttctccatgagggccccacccctgtagcaaacttttgcctggacatccaggcatttccacacatcttctgaaatctaggcagaggttcctaaacttcaattctttttttttttttttgagatggagtttcgctcttgtcacccaggctggaatgcaatggcacgatcttgagtcactgcaacctttgcctcccgggttcaagcgattctcctgcctcagcctcccgagtagctgggattacaagcatgcgccaccacgcatttgttgtatttttagtagagatggggtttcaccatgttggccaggctggtcttgaactcctgacctcaagtgatccgcctgccttggcctcccaaagtgctgggattataggcgtgagccactgtgcctggccctgaacctcagttcttggcttctgtgcaccagcaggctcaagaccatgtggaagctgccaagacttggggcttccaccctctgaagccacagcccgagttatacgttggcccctttcagctacagctggagcagctagggcacaggacaccaagtcccagggtgaacatagcacagggaccctgggcccccaggaaaccactttttcctcctgggcttccaggcctgagatgggaggggctgccgtgaaggtctctgacatggcctggagacattttccccatggtcctaattaggttccttgctacttatgcaaatttctgcatctggcttgaatttctccctagaaaatgggtttttcttttctatcacatagtcaggctacaaattttccaaacttttctgctctgcttcccctataaaactgaatacctttaacagtacccaagtcacctcttgaatgctttgccacttagaaatttcttccactagataccctaaaacatctttctcaagttcaaagttccacaaatctctagggcaggggcaaaatgccatcagtctctctgctaaaacataacaagagtcacctttactccagttcccaacaagtttctcatctccatctgagaccacctcagcctggaccttattgatcataccactatcagcattttgggcaaagtcactcaacaagtctctaggaagttccaaactttcccacattttcctgtcttcttttgagccccccatactgttccaacctctgactgttacccagttccaaagatgcttctacatttttgggtatcttttcagcaacgccccacttaccgctaccaatttacagtattagtctgttttcacactgctgctaaagacatacctgagactgggaagaaaaagaggtttaattgaacttaagttccacatggctggggaggcctcaaaatcatggcgggaggtgaaaggcgcttcttaacatgttgatggcaaaagaaaatgagaaagaagcaaaaaaggaaacccctgataaacccatcagatcttgtgagacttattcactatcacaagaatagcatgggaaagactggccccatgattcaattactttccccgggtccctcccacaacacgtgggaattctgggagatagaattcaagttgagatttgggtggggacacagccaaaccatatcatgaaccaagagagaaagaaacatgttttaatgaatcttctcaggcggctgaggcaggaagatggcttgagcccaggagatggaggttgcagtatgttatgattttgccactgcctgggtgacagagtgagatccatctcaaaaaaataaattagaaaaagataaactgcagagcataaatgttatgggctacttttgacagaggaatcaaatcttccttgccaaatttagacccgtgtgggtcagcagaaattgactagaaatagtggccaccgaatggtaactcacaagggtagcagttaaagttggtaaaattttaaatgcacacaaaaccaatggacgaatcaacttttcctcgcaaaaccaacaactaagtttcaacaactgagaaaaagtttcatattatcaggccagacactgtggctcacacctgtaatcccagcactttgggagactgaggttgggggacagcttcagtccaggagttcgagaccatcctgggcaacatagcaagactctgtccttaaaaaaagaacttcaaaagcaactgtattaaagggagttacagatggatatatacagtaaaattgtttaaaagtagaacactatctaaatagtagaacagcattacccgaagttcagaaatacattactaacactataattgtttttggacacacacatatgaagtaacgtaaaaggaagggtgcaaattcactttataatagcaattatctatgaagacagtttcaaaaagggcaacaaatatatctataaatgttttgagccagttgctgtggctcatgcctgtaatctgaacactttgggaggctaagtcgggagaatcacttgagcccaggagttcgagaccagcctgggcagcatagtgagactccgtctctacaaaaaataaaaaattagcaggtgtagtggcgagcgcccgtggttccagctactcaggaggctgatgcgagaggatcgcttgagcttgggaggtcgaggctgcaatcgcaccactgcactccagcctgagcagcagagcgagactctgtctcaaaaacaaaacaaaaacttgataacatagtcataaattagcatttatcgaatgataaatatgtgccagactgttctaagccctttccctgcgtgatctcagtgaagtcccataatagccccgtgaggcaggtactgtcctttatccccattgcagggatgaggaaattgaggccctgaggtcgaagaggagctggtaagcgatgatgccgagataggccccggatcgcctggctctaaatccccagcccgggccccgacacacagtcccagggtgggagaggtggtcttcggggtccgggcaccgcgaccgcggcccaggcccgcccggccagctgcgcgtaccgtgtagagcgtcaggtcgacatgtcgccacagccaccggtcgtccaccagcctcttccagcggtgacagaccctgggggaggggacgcgcggttagaacgaccccagccccgggccacatcgcatctccaggtgccagctgcgccctccgccctgcccttccccccggaggcggggccgcacctggagatgcggatccggtcccgtaccgggaggtaagagaagatctcgagcaggaccgagtccggcagttcgaccaaagtcgccatgatcccgccgacacgcacttccgcttccggttaaagagacccgaggggtcctgggggcgccgaggcggctgacagggcggcggccgcgaccttcccgtagccggtcgagaaatttgaccttcctctcgctgggaagtgattcggtcccagggccggaccagccgcggatggggaccagaaaccagcctggaaagcgtggctgaggcagtgagaggcttgcgggaggtggctgaggcgtgatttggccgcgactgggaactaagaccaagtccagaaggcggggctggagtgaggcgaagctcggaggcggggctagagacgaggaccaagtccggaaggcgtggccggggtggggtgaggatcggaggcggggctagagaccaggaccaagtccggaaggcgtggctggggtggggcgaggatcggaggcggggctagagacggggaccaagtccggaaggcgtggctggggaggggcgagacccggggacggggctagaggcgaggcccaagcccggaaggcgtcgctggagttgggcgaggctcaggggcggagccagagaacggaaccaagtccagaaggcggggctggggcgcggctagggggcggggctagagacgaggaccaagtccagaaggcgtggctggggtggggcgaggatcaagcccggaaggcgcggctggagcggggcgaggcctaggtggggctgcagacgagaaccacgccttggaggcgtggctagggcgggtagaggctcggacaaccgctggaaggcggggctggggcggggcgagaccttgggggcggggttgacgacgaggacctagccgagaggtcgtggtctggacggaaaccaggctgcagcaggaccaggcgccaagggcgtggctggggagcgatggagacgctcggaaggtggggagcgggggacggagacagggagaagactacgccatgaaggcgtggttgaggcggggcgaggcctgtgggtctggccccgagcgaatggcttggtagagagtcagagaactctatttttttacttaatgatgcttcttgatgtctatgcacaaggataaatttgtattactggaatatcgtggccaaaggacctgttgaatttttcactttcattgatactacagatattttctgaattggcaagtccaccaagaaactataaaaatgtgtgtgtgcaatggctgcacacagcagcttccttggtagtgtacgcagcctgttggttgtatgggttgctctaagggaccttggagacaggcctttccgatggatgttcatgtttctaaccttgcactaccacaatgtaggctccaaacaggcatgtgaggtgcctttggaaagccccagggcactgtggccagggttgacattggccaagttatcatgtccatccgcaccaagctgcagaacaaggagcatgcgattgaggccttgcgcagggccaagttcaagtttcctggccgccagaagatctacatctcaaagaagtggggcttcaccaagttcaatgctgatgaatttgaagacatggtggctgagaagcggctcatcccagatggctgtggggtcaagtacatccccaatcgtggccctctggacaagtggctggccctgcactcatgagggcttccaatgtgctgccccccctattaatactcaccaataaattctacttcctgtccaaaaaaaaaaatgtgtgtgtgtgtgtgtgtgtgtgtgtgtgtatatatatatatatatatatatacacacacacacacacacgcacgcctcctgaagccaggaggcggagattgcagtgacctgagatcgcgccaccacactccagcctgagtgacagagcgaaactccgtctcaaaaaaaaaaaaaaagaatatgaaagagattgtggaggttgcagtgagcccagatcgcgccactgcactccagcctgtgcgacgggtgcgagactccatctcaaaaaaaaaaaaaaatcatgttactgcaaaggacatgatttcattatctttttttttttttaaatttgggacagggtctctctctgtcacccagtctggagtgcagtggcgaaattatagctcactgcagccttaacctctggggctcaagtgatccgatccttccacctcagtctcccgagtagctgggactgtaggcacatgccaacacgcccggctaatttttgttttgttttttgagatgaagtcttgctgcatcacccaggctggagtgcagtggcacaatctcggctcactgcaacctccgcctcccaggttcaagtgattctcctgcctcagcctcccgagtagctgggactacaggcgcccgccaccatgtccggctaatttttatgtttttagtagagatcaggtttcactatattggccaggctggtctcaaacttctgacctcaggtgatccacctgcctcagcttcccagaatgctgggattacaggtgtgagccactgcgcccggctaatttttgtatttttttctagagccggggttttgccatgttgctcaggctggtcttgaactcctgggctcaagttcttcctgcctcagcctcccaaagtactaggattacaggcgtgagccaccacgcccagctgattgcattttttttatggctgcattacgtgtgtcttcttggcttgttgccctcctatatcagactgaattctggggtggcaggtgggacttgtgcaccccggccctgctgaggtgctcaggtaatggggggaggaaactcctatgcccctccctccacccctaagattatttcccttcttgtgaactctggcaggggaaggggagtgcctctaagtttggcagaacccaggtgtcccttccctgccatccctactcagttacagggggttcctgcaccaccagcatacagggctggagagagggaagtagtcaggtgagagcaaaagaaacccacatacaagctccttcctctgggccaggaacccaagaagcaaggggggagaagaagcctccccagcttgctccttgggtcttgacccaaaactctacctcctgggaagtatccacctcccccaaggaaaagcggctgtgagaacagcagatcttcctacagcaggctaggtctccatgtgcaaccacagcagtgagccttcaccaacaccttgtggtagctctgatgaatacgtaagttaaatattaaagacctggaaaaactggggccttcgagcaagggctagaaggtaaaacaaagtccttaagaccctgcctgggttttctcagaacttaagagttcagttaaaataatggaggcattcttacatacctcgtaaaccttgtaccaggatccactttattttttaaaatttactttcttttctttattattttgagacagagtttcgctcttgttgcccaggctggagtgcagtggcacgatctcggctcactgcaacctccacctcccgggttcaagccattctcctgcctcagcctcccgagttgctgggatttaaggcatgcgccaccatgcccagctaattttgtatttttagtagagatggggtttcaccatgttggtcagactggtttcgaactcctgacctcaggtgatagctgatccgcccacctcggcctcccaaagtggtgggattacaggtgtgagccactgtgcccagccttttttttttttttgagagagtccgactctgtcccccaggctggagtgtagtggtgtgatctcggctcactgcaacctttgcctcctgagttcaagtgattctcctgcctcagcctcccaggtagctgaaactacaggtatgtgccaccacacctggttaatttttgtatttttagtagagacagggttttgccatgttgcccaggctggtcttgaactcctgacttcaggtgatctaccaccttggtctcccagtgttgggattacaggtgtgatgtaatggcacccggccccattttcctcttctctcagcagcacttcccatccctttcccaactcctcgccccacagctcagcaccaagaccctgtgcttggcagatctttgaatcaagcactgagaaattagaacattttgaaaaagcaaacatttccttttccacccccggtgattacaaaagtaacatatgttctgtgtcagaaatctggaaaaacaccacgaagagggaaaatgaggccgggtgtggtcgctcatgcctgtaattccagcactttgggaggatcacttgaggccaggagtttgagaccagccagggcaacatagtgagactgtctctccaaaaattaaaaaaatcagccaggcgtggtggtgcacgcctgaagtcccaggaggtgagtccccttgagtccaggaattggaggctgcagtgagctataattgtgccactgcactccagcctgggtgacagagcaagacactgtctcaaaaaaaaattaaaaaattaaaaaattaaaaaaaaaaaagaagggagaatgagactctcagtaatcctaccatgaagtggtaactacagtcaatgcttgtgtgaccctgcatttctttgttttcaaacagtctcactctgttgcccaggctggagtgcagtggcatatctcagctcactgtgacctctgcctcctgggttcaagcgattctcctgcctcagcctcctgcgtagctaggattacagacgcctgccacatttttgtatttttagtagagatggggtttccccaattggccaggctggtctcgaactcctgacctcaagtgatccacccaccttggcctcccaaagtgttgggattataggtgtgagccaccgtgcctggctgtgacccaggatttctaagagaatgcaaagatgtgctgcttctaaacttccttaggcacctcagccccctcagctcacttttgaccttccaatctgtttcatcccggctagagtctccccaaaagcagaggcaggggaattcccacaaaggaatgccctaaatcatcccaagatggggccagtggggatttcaagaaaacaccaattaccagagcaatcagtccaaagcatttattagggaaacttacagagtgctccaacaatcatcaagacaggaacgaaaaggggtgttctaccgaggcacagctgcagctagggggtcaggacatggagttcagatgcacaagtcagcatgtctggtttccattactattttgagtaatgggccacctgctggtctggcaggtgtcagcttgaccaaaacaggattgtggattctttccctgggatgggacgttccacaaccttggttttatatttagattttcttttttttgtttggtttcttttggagacggagtctcactatgtctcccaggctggagtgtagtggcgtgacctcggctcactgcagcctctgcccccctgggttcaagagaagaattctcctgcctcagcctcccaagtagctgagactacaggcgcaggccaccacgcccggctaattttttgtattttagtagagacggggtttcagcgtgttgcccaggctggtctccaactcctgaactcacacaatccgcctgccttggcctcccaaagtgccaggattacaggtgtgagccaccacacctggcctatatttagattttcaaggccagtttctggaatttttaagcaaagtacacgggataaacattatgagaccttagcacagaaaaacagaagagaggttgggtgtggttgcttacacttgtaatcccagcactttgggaggccgaggcaggcggatcacctgaggtcgggagatcaagaccagcctgaccaacatggagaaaccccgtctctaccaaaaatacaaaattagctaggcatggtggtgcatgcctgtaatcctgggagtttctctcttgttgcccaggctggagtgcaatggcaccatctcgactcaccgcaacctccgcctccctggttcatgcgattctcctgcctcagcctcccaagtggctgggattacaggcatgcgccaccatgccaggctaattttgtatttttacaaaattaaagagatggggtttctccatgttggtcaggcaggtcttgaactcctggccttaggtgatctgcccactttggcctcccaaactgctgggattacaggtttgagccactgcacctggccttggagaattcttaaaccactgtagcagtatagttcaacgatagtaaaagggggttttagtctctggatcctgccattcaaaagcaaataggccggttgcggtgcctcacgcctgtaatcccagcactttgggaggtcgaggtgggcagatcacttgaggtcagcagttcgagaccagcctggacaacatggtgaaatcctgtctctactaaaaatacaaaaattagctgggcgtgatggcatgtgcctgtaatcccagctactaaggaggctgaggcaggagaatcgcttgaacacgggaggttgtggtgagctgagtttgttccactgcactccagcctgggcaacagagcgagactctgcctcaaaaaaaaaaaaaaaaaaaattgagatagcctcactctgtgttgcccaggatggagggatggagtgcagtggcgcgatctcagctcactgcaacctccgcctcccgtgttcaagcgattctcctgcctcagcctccaggtagctgggattacaggtgcctgccaccacacctggctaattttttttttttttttttaatagagacggggtttcaccatgttggccaggctggtctcgaactcctgaccttgtgatctgcccacctcagcctcccaaagcgctgggattacaggtgtgagccactgtgcctagcctcaaaaaaaatttttttttaaaggccagatatctccacaggtagcttactttatgttatggaaagtgccaatttactgagcaccaaatgaatacataatggagtattcttcatgtagattaaataatgtgaccatactctccctctttcccctccagcccacttttccctttaaataatgaagccctcaaaatcatatttggaaaaaagcacggatcacagattgttcctggggttttgtgttccttttctcccaggcttgtccttaaccttgtctacataaacctgtcaatttattgagacctgtctcagatactttttggtttacaaattgtttgactgaattgaggaaggacggtccttgtcccaccagccctcacaaacctggaatctggtacaaagtgctccccaaagatacagctgcaggagattgtgcaaatgtgcaatgtttccagttacctcgcaggcatttaaggttggtgactggcagtgagaaaggagaatagggaaaatgaggcagaagaatagcaaagggaattaaaagttggataaagggtaaaatacgtaaaagcagagagcagaagcaaggtgaaagggcacccgccccttcttgctcacccagcaagaagcaagataaatggcagaagctgaggagacaaaacaaaaggaagattaaaaactgagtaaaggccgggcacagtggctcacacccaacactttgggaggctgaggcaggcggatcacgaggtcaggagatcgagaccatcctggctaacacagtgaaaccccgtctctactaaaaatacaaaaaaattagccgagggtggtggggggcgcctgtagtccctgttactcgggaggcggctgaggcaggacaacggcgtgaacccgggaggcggagcttgccgtgagcccagatcacgccactgcactccagcctgggcgacagagcgagactccataaataaataaataaataaataaataaaattaaaaaaaaaacagtaaaaatcccacggccggggaaatcaggaccaaaccagtaaggagcagctctttaggcataagcacgcgcattaaagacaaaaagtatccttaacatgataaggataaccagctcattagcgctcatgcatatggacggcatatcatgaatggaggcggctctcaagcacacaggggccaaagtaagcaacacacctatcattcaaaaaggtagacactggctagatattaggcagccttgggaagagaaaaaaagcctggccaataaggtgaaaccccatctctactaaaagtacaaaaattagccgggcgtggtggcgggcgcctgtaatcccagctacttactcgggaggctgaggcaggagaatcgcttgaacccggaaggcggaggttgcggtgagccggcaccgcgccattgcactccagcctgtgcaacagagcgagactacgtctcagaaaaaaaaaaaaaaaaagacccaaactataccaagctggggctgatcttatctcgcagaggtcagtccgctctccccactccgagagtggaatactgtgcttaataaacttgcagctttgccatctctgtgtgtctggtccaaatctttcttcaggacaccaagagcctggaactgtccggcaccatgcggtaacagcagctgttgggcagcgtagagtctactctaggatcaagcttcgcctactgactggagtccgtatcccgggggaacgcgatggccagagggaagaggtgagccaaatgctcaccaagcccagccctgaatgaacccagggggtcagaagggatgactgcagaactcgtcccccacccccaccctccgcccttgctcctagttgccgctgcaagaggcttcgggctcaggatcaggagcttacccctactcccgggaccctctggcgtccccaccatgtgaccgagtctccctgcaacaaacaatgacttcaaacgagctgggcgccggcgcctgacctctgactctcgctccacgccccttccctggccacaaacccgccgaggcccccctctctacccggcgcgcctaccacaggcgcgacacctgtcaagccttgggacaccgaaaccgtacctgggaacagcaaacacaccacagactgcagacccggaagaacttgtcccagtgttgaccacaccccctggctaggggcagggcttccggcctcgaactttaacttccgcttccggttcctagcgttaactgcgaccggggttcagcgctcgggtgaggagctggtggcgtcggcaggttcgaggcgattcgaggtgagggggtcaagcggagaggctcggagtcggagaaagctgtcgcgacccagccacccagggtctggggtcggtgggaggtgaggccagggagttttgtggcagggctttcaggcggcgagaaggggcggaggcgcggctccccggggttcgcggccctgggacaggggacttggggcctgggagtattcgagtccggggggttgggggcagaacggaaggctcagtaacctggaattttagggcctgggactgggagacttgtaggctggggcttctgggcctgggagacgcctgaagctctgactttgctgcctcccacccaccccccgctttgtgtagctccagctaggatgatcgaggttgtttgcaacgaccgtctggggaagaaggtccgcgttaaatgcaagtatccactggcagccgagaggcagtggtacccgcaggggtgcttggcgtgaggcaggcaactcaatctgtgttgtcggatggttttagttaaacccgggagagggggcggatggggtcctggcagatggtattctgccctagaatgtcctcttcctcgttctaccgcttccatttgccttaactgctctgcgcccagcacggatgataccatcggggaccttaagaagctgattgcagcccaaactggtacccgttggaacaagattgtcctgaagaagtggtgagtgcagcggtagagccactgggtggactggactaggccggaaggttttggttgggggagcgctgcaggcagccctttgcttaggcttggctacctcatttggcctacagactgaagagcctccttagccttatctctgaaatgtctctttttcttaggtacacgatttttaaggaccacgtgtctctgggggactgtatcctttgtgtgactttttgaggaagcatctacatacccagcctcggttatctgttcaaaactaaagtctgcatgagcttatgcatattaagtgtttaacttaatacgtggcacatggtgagcacttagaaaatgggagctaggtaattatttggttggggaggagagtggttggtgaaatagtttgacttcaagttcaaaatatttattactgacctccacctgagtgctggacagtaggtcagggtggggtgagactcaggcatatctattgtgcaaaaggagcagaaactttttacaatttttattttatttatttatttttttgagacagtctggctctgtcgcccaggctggagtgcagtggcacgatcttgacccactgcaacctccacctcccgggttcaagcaattctgcctcagcttcccaagtagctgggattacaggtgtgtgccaccactccctgctagtttttgtatttttagtagagatgaggttccaccatgtatgccaggctagtctcaaactcctggcctcaagtgatcctcccgcctcggcctcccaaagtgctgggattatagccgtgagccactgtgcctggcctagaaggaacagaaacttttttttttttttttgagatggagttttgctcttgttgcccaggctggagtgcagtggtacaatcttggctcactgcagcctctacctcccaggtttaagcgattttcctgtctcagccttccaagtagctgggattacaggtgcccaccaccacacccagctaactttttgtatttttagtagagacagggtttcatcgtgttggccaggctggtctcaaactcctgacgtcaagtgagccacctgcttcgtcctctcaaagtgctgggattacaggtgtgagccactgcacccagccagaaattcttttgtaaagttttggttctctccaaataaaaatggcctggtccaaaatgggcttccttagccctgggctgagacctcaggccacctgacccggctgtgaatggatgagaggggtggggacggaagtcagagtcaggattccttaacacctttccttcagatgaaatccacgatgggatgaacctggagctttattatcaatagatgagaatcctcatcttcctgccccgctttcctctcccatcctcatcccccacactgggatagatgcttgtttgtaaaaactcaccttaataaagacttagatgttgctttgttgttgtctctgtatgacagctgtctagtgatgggtggatcagtcgctgtttggtcatcactgcaccatcagcatgcagctgctaaaataagagctctgatcaactggatccatgagggcagagtagaccagcaggctgggagtctgtgtgggagcccagagagagctctggggtttgctgtgggtgtctgaaggtcaagagactctgggattattgtcaccctaataaaccaaagaacctccggctaatgacagtagatgtaattgttaggaattcagattctgaaatcacacagaccatgtgtggaatgtcagctctgccaccaagcagctgagtgacactaggcaaaattttttaacctctgtaagcctttacttccttatccactggaaataattgcgtttacttcatgtctgctttcaatcggcatattgtgaggaggtataaatgagtttaaagcatgtttaaacatccacagttcctggcattttttttttttctttttttgagacaggatcttgctctgtcacccaggctggaatgcagtggtatgttcatagcccactgcagccctgaactggactcaacacagtcctcctgcatcagcctcccaagtagctgggcagtgtgtaccaccacgccagctaattttaaaattattattattatttattttatttgagacagagtctcgctctgtcacccaggctggagtgcagtggcacgatctcagctcactgcaacctctgcctcctgggttcaagcaattctcctgcctcacctgaggcaggagactgggactacaggcgtgccccatgacaccagttaatttttgtatttttagtagagatggggtttcaccatgttggccaggctggtctcaaactgctgacctcaagtggtccaccctcctcggcctcccaaagtgctgggattacaggcgtgagccaccgcgtctggcattttgaaattttttgtacagacagggtctcccctatgttgcccaaaatagtcttgaactcctgacctcaggtgatcctccagccttggcctcccaaagtactgagattataggcacaagccatcatgcctggccctagcacttcttttcaagacaaaacgtgatagtagacagtgaggcagtgtggcactataagtgtggctacatgatcccagcctcaagagtcagaccgactagatttgaattttgattgatccttagcagtgggatttcagcctctgcgaccctcagtttcatcctctaaaaatgagcactacagtggcacccacatctcaatgagaccacgcaattagaatagcaggatgcctggcacataatgttatttgctgtattcttcctctaggtgtgagtagacaggagaccaactgtccctctgttcccctggccacagttctttgtgtcaaccttgctcctgtcctgttttattttttaaattaaaaaaattttttttttgagatggagtttcacacttgttgcccaggctggagtgcaatggcatgatctcagctcactgtaaaccccgcctcctgggttcatgtgatttttttgcctcagcctcctgagtagctggaattacaggtgcatgccaccacacccagctaattttttttagtagagacagggtttcaccatgttacccatgatggtcttgatttcctgacttcatgatccgttcacctcagcttcccaaattgctgggattacaggtgtcagccactgcgcccggccctgaatttcttatttcttataccactcctcccaccagtggtgggcattaatacatttgagtgactctagaaactttctggaataacctagagtttttatcatacggggataattatatgtcccgtaatatttatatgacattccatagtttgcttttctgtgcttttttttaattattattttttattattattttttgagatggagttttgctctttttgcccaggctagagtgcaatggtgcaatctcggctcactgcaacctctgcctcccgggttcaagcgattctcctgcctcagcctcccaagtagctgggactacaggcacgagccaccacacctggctaattttttgtatttccagcagagacaaggtttcaccatgttggccaggctggtctcaaacacctgagctcaagtgatccgcccgcctcagcctcccaaggtgctgggattataggtgtgagccgttgggccagccatgatttagcaattttgaaactacttttgtgtgtgtgggtgtgggcacatgggcccatgtaatacacacaaacagggttgaacaaataagtaaacttgtagataatgagagctgggtgtctcactgtggagaaggaagttacaaataaaacaggagatgggaatgcttaaaatgaaccttgtaggactggatttggaggcatcagtctgaattcatggttttcgtttaacagatatattgatacatatagatgtgtgtatacatatgtatatttccttgctctatccacttagagggaccagaaacagtgacactccaggaacagtgagcacccatcctggaacataaaaacactagtgggaaaacaggattggggggaatttgtggtttagttaatagtattatattgatattggtttcttagtgttgataattatattatagcagggtttctaagctttggcattgttgacttttttgggttggattttttttttttttttttttttttgagacaggctggagtgcagtggcacgatcttggctcactgaaagctccactccaggggttcaagcaattctccgcctcagcctcccgagtagctgggattacatgcgcccgccaccacacctaattttcgtatttttagtagagatgggttttcaccatcttggccaggctggtcttgaactcctgacctcttgatccacccaccttggcctcccaaagtggtgggattacaggcgtgagccaccgcacccagccttttatttttatttatttatttattttttgagacagagtctccctctgtcacccaggctagagtgctgtggcaagattatggctaattgcagcctcttaactcctagactcaagagatcctcccacctcagcctcccaagtagctgggattacaggcacgtgccaccacacccagtgaattatttttgtagagatagggtcttgccatgttgcccaggctggtccccaactctgggctcaagcgatcctcctgccttgggctcccaaagccctggattacaggtgtgagccaccacactcagcccttggattggataattcttttggtgggggctgtgccttgaaggatgttagcagcatccttggcatctaatactaaatgccagtagccagtagtatctcctgttccaaaatgtctgaaggtgttgtaacaaccaaaaatgtatcaagatgttgccaaatgtcccttgggaaacaaaatcgctactggttgagaattctgttctattgtttatttaagacgctaatattagggaagtttgggtgaagggtacatgaaaaccctactgtttttgtaactgcccatgtctaaaattatctttataaaaagtatctttttaatattatgctaatacttgtaaaaaatgttctattaaaacttaaactttttttgttttttgagatggagtctcgctctgtcacctacgctggagtgcagtggtgcgatctcggctcactgcaacctccgccttccaggttcaagtaattctcctgtctcaaccacccgagtagctggaattaaaggtgcccactatcacgcctggctaatttttgtatttttagtaaagacagggtttcaccatgttggccaggctggtctcgaactcctgacttcaggttatccacccacctcggccttccaaagtgctgggattacaggtgtgagccaccgagcctggcttgagtgctttatgtggattaatttatttaatgttcacatcaaacagaaggatgtaattgcttatccccgctttgcagattgggaaaccgaagtacagagtaacgttaagtaatcagttcaaggtcgcatagcaagtgtcagtcccaggctttaaacccaagtctggctccagacttctcttagccttctactgcatcctgcgtctaatttgttgtgggcaggtttccctatgagttcacttcactgagcctcattctttttaacggtcacatagggttctatgctaggtgaactgtagttgcaccctttgctgtcagtgtcttcaactcccatatctacccacagttccccaactctgggtccccaaatacctcccctgtgtcccacgggctctgcagactctattttaagttggctaaaactgagcccatctcctcccacctgcacctcctccgtgttcttatatgaatgtcaatgtcggcacccactggtcacccaggatggaggaaggagccagactgcgagggaataaaggaagtaagcaggttccaaaggacgtggaaggcctttgggtccagagcctagggaaaagttgagccctgcaaaaaataaaagaggctgggttagctttggacatctgtgggaaacaggtgggaagagggaggatggaggagccaaatttaagcatcgggtacttaggtgctcatctccaaggcaactgcattgctatggcaacagcagaggcagcaccgccccgcccaagtacctcctggaccgccgttacctctgcaccagccagactcttccgcatgggagggctgggggcttgcggacctccgggaacagctcaggcaggcgggagttgctgcggcattagccaatccataagctctatcccgcctgggtgggctctgcggcgacgcgcgccaagaaggggtcgggagttttttggcgctcgctaaagggcgttgagaagggcgggcccgcgtcgcttcggaccactcaggagccgaggagagcgagtgggcggggccaggctgaggctggccgggggcggggcgcagggataacgtgggagggtccgcccagcctttcttctacccaatagaaggccagaaagccaatccggaccgttagggagcccaatgggcgtcgccgccaggccccgttgcagagcgcgtctagccaataggcagcggcggcgggcgggcgcgggcgacaggcggcgcagctgaggcggagcaggcgctgcggcaggagggaagatggcggacgaggagaagctgccgcccggctgggagaagcgcatgagccgcagctcaggtgccgcgggggtcggggctggggcgggactgcgcgggcccgcgtaagcagggctcgagctcgccccttgggcgcggcggcagcgctgcctccctcccatggggtcctggctcttccgcgtcgtccccggggtaacggccccggcccgccctgttgtggggactgcgagcctcaggagccgccgggaagcctgaggaagctgaggcagggggctgggcgggtgagggtccggggagtccggggcgatggccctggccctgccggcccggctgatacctctcggcctaatgcacctgacaccccgggggacgtctctgcaccttgctgggcccgggggcacccctgggagggagacaccccagtaccctgcaaagggcgtagggtgttgcccggcctcgggtccacaacctacccctgctaacacccctactgtgtacacctaatgctgagtctgcgacatcgcccgtgacattctgccagacgatggcccctgtgcttaggcccgatttaagggttagccacaatgataatattgccagtaacagggcatgtttttctctgtgtcaagcgctttaagttctctctgaattgccgcaactctgggagccaggtagttattacttccaccttaccagcaaggaaactgaggtcagaaaactgaaggaactcgtccaagatcattcatttcaggggccgggggttggattaggacctaggcagtttgcctacaaatccccctccccgtgtcactgcaaactcctgaggagcaggcccagcatctgtgggcaggtcccgagtcactctgctgcctctagagcccatagcaatcgcatttgcaataataattctccttggttgagtgccaggttctggtgaactgtttggatacatggactctcctcattaaccccatgaggtttgatctccttattctctattccccatttttcagatgagaaaactgaggtgcagggagattagagcccattgccaaggttttagagtgagtcagtagctcagctgcatttgcacctggaacccgcgctctcgcccaccctgctctagccctggcctgtggctgggacctccagcataaaccggatgctctgcccagctctgggcccatttctgctgtttctgctcagttcaaccctgatggcttcctttatgggtgacactccatgtcacccaggcgaactgtcagcctttggagtggcacccagtagggtctttacttccagtttcttgttcacagtcttcactccttcatacccctcactccctgggtaacatcgggccaccagtaatgctggttcctagctctgcaacaccatgcacggtgtagtagctaagagcagagctttcgggtgtgaagtacctgagtacagttcctgccttcccctgtgtgtgcctggaacagagtaaacactcaggaagcgttacccactgctgccattcccagagatgcaaaaggtgaggtctccgttttgccatctatacaatagagataataaaggctatcccactcttaatgtgtgccagtttctgtcctaggcattttgtagatgtgtgagcttatttagtgctttcttattattatttttggagatggtctcactgtgtggctcaggctgcagtgcagcctctgcctcccaggcttaagcaatcctcccacctcagcctttcaagtagctgagaccacaggcgtgtaccacccacccatggctaattttttattttttattttttattgtttgtttgtttgttttgagacagaatctcactctgtcacccaggctggagtgcagtggcatgatcttggcgcactgcaacctctgcctcccgggttcaagtgattctcctgcctcagcctcccgagtagctgggattacaggtgcctgccaccacgtctggctaatttttgtatttttagtagagacgaggtttcaccatgttggccaggctggtctcgagctcctaacctcaggtgatccacctgcctcagcctcccaaagtgctgggattacaggcctgagccactgcgcccagccagcctgttgtttttgtttttgttttgagacaagagtctcactctatcgctcaggctggagtgcagtggcatgatcttggctcactgtagcctccaccttccagattcaagcaattctcctgcctcagcctcccgagtagctgggattacagacatacaccacaacgcccggctaatgttggtttgtttgtttgtttgtgacggagttttgctcttgttgcccaggctggagtgcagtggcacaatctcagctcactgcaacctccatctcccgggttcaagcgattctcctgcttcagcctccccagtagctgggattacaggtgcctgccaccatgccgggctaattttttatatttttagtagagatggggtttcactgtgttggccaggctggtcttgaactcctgacctcaggtgatccaccccaccttggcctcccaaagtgctgggattacaggtgagagccaccgtgcttagcccttttaaaaatgtttaaaaattattatttagtcctttcaatgaccctaaggtaggaactgttatctccattttgcaggtgagaacaccaaggcccagggaagatatatcacatttgaacccagattcagatttgaatccaggtggcctggctgctgagtgcatggtttgagtcactccctgtcccccagcttcctctgttccatcactctgggttattttcctccttgaagttatcagggattgatactatcctgtgtttcatttgcttgtttagcacctgtctgctctcacctagaatgttagctctctaagggcagggactgtatcctgccacattggcccacgtctggagagcctgtggcacatggtggatacaccatggatttgttgaatgaaggcgccccctgcaagccaggccctcaccctggcttctggctgtgggcccaggggtgtcctgggagcacaaccctagctgaattcctgcctgccctcccctccaggccgagtgtactacttcaaccacatcactaacgccagccagtgggagcggcccagcggcaacagcagcagtggtggcaaaaacgggcagggggagcctgccagggtccgctgctcgcacctgctggtgaagcacagccagtcacggcggccctcgtcctggcggcaggagaagatcacccggaccaaggaggaggccctggagctgatcaacggtgagcagggcgagggcaggggcttgggagggggtcttctcccaggtgagcctttgtagaagtcacatcagacccttcaccccagcttgctcagctgccaggcgtggtgttggccaacacaaaaacgccagtgcatgacctgaccctgaccttcacagcagccattctctttcttttccatctggcatttgagggtgagccaggtaggggcagaggacccagcctgggggctggcagacatgggttcaggtagtagctgtgcctctgtgaactctgtgacctttgggaggggactcgtgtcacctcccctagactcagctttctctgtaaaatgggcatcctctaaggaccattgtgaaggttcaagggaataaggcaatggattttgcacagtaggccctcagtctgtgggaagtgttgtcaatagtaatatcatccactaggggcctgagtcataaacataggtggatccagagagagcagtcaggaaggtagtgagtgcatgcagggtgcggtggctcacgcctgtaatcccagcactttgggaggccttggagggcagatcacctgaggtcaggagttcaagattagcctgggcagtatggtgaaactccatctctactaaaaatacaaagattagccagatgtgttgacgcatgcctgtaatcccagctactcgggaggctgaggcagggaggcagaggttgcagtgagccgagatcgcaccactccactccagcctgggcagcaaagtgaggcaccatctcaaaaaaaaaaaaaaaaaagaggtagtgagtgccagtagatagtgagttaattctgacctaagggaggaagctattccctgctctgttctgtgtttcctctgcagtctggcaccaaggtggcaaactttaaaggccagatggtaaatattttaggttttgtgggccatgcagtctctatcagctctgctttgtaactggatagcactcataactaatatgtaagcaagcacatggtcatggctgtgtgccaagaaaactttactatttacaaaatctgggaggatttggcctgcaggccatcatttgcagagccctgtctaaagctgtccagtttggctgccactcccaccctgtgcgggaggatcacttgagcccaggagtttgagaccagcttgggcaacatagcaaaaccccgtctctaaaaaaataaaaaaattagctggacatggtggtgcacgcctgtagtgtcagctacttagaagactgaggtgggaggatcctttgagcccaggaggcagaggttgtaatgagccgagatcacactaccgcactccagcctgggtgacagagcaagaccctgtctcaaaaataaataagataatatcaaaaattggtttctcaattgcactggtcatactttagctggtggctgccatctttgacagcgggaatataaaacatttacattcttggccgggcgcggtggctcacgtctgtaattccagcactttgggaggccaaggtgggtggatcacgaagtcaggagatcgagaccatcctggctaacacggtgaaaccctgtctttactgaaaatccaaaaaaattagtctggcatggtggcgggcacctgtagtcccagctactcgggagataggcaggagaatggcatgaacccgggaggtggagcttgcagtgagctgagatcgtgccactgcactccagcctcggcaacagagcgagactccgtctcaaaaaaacaaaaacaaaaacaaaaaaaaacacttttccattcttgcagtaagttgtgtctgatgcctttctcagagtccccaaacctgggctgtccctactccaaacaacccatctctcaaccatgcccagacagcctgggttgctatgcagctctgccacgtcctggctatgtgctcttgagcaagttacttaacatctctgggcttcaatctttttctccttcttcttttgagacagggtcttgctctgtcacccaggctggagtgcagtgttcatagctcactgcagcctcaacctccttgggatcaggtgatcctcccacctcagcctcccaagtagctgggactgcaggctcataacaccacacctggctgatttttgtatttttagtagagacaggacttcaccatgttgcctaggatggtctcaaactcctggcctcaagtgatccttccacctcagcctcccgaagtgttgggatgacaagcatgaaccaccgcccccagctgtcagtctttttcatttataaaattagtattagaataataagacccacttcacagggtagttgtgaggactcctggctaatacagtaaagcgggagtaacagctcctggcatcggtaaatgttctgtcattgttagtggtcactgtcattgctgttgttggttgtggtagcacagggcccagcacagagtgtacactcggtcagtattggctgttgttttactctctcatcacttggtccagttggcctgtaggatgttattacatatgcacacccccaacatggcatctaggacagtaagtgccacccgttagtcttatatgtaagcatggcagagagaagccgagttcttgcacagaatcttgaaggctgattgaagagccagcctcctgacctctgagggcagggactggatctctctctttcccctgtattcccatcctgccacacaaagcctggcccagagtcagccctcacagccttgtttcatgagccagtaggaagcaagaaggattcctggcacaggacggggcagaagtaaaggcctaggactaggatgtagccagaactctggggaaggctttgcagggagctagggggtgatgagacccttcacgggcaggtcccagccaggttgaggagggtccttgtcaggtgaggaggtttggttctttcctggaggcagcaggacatatgtggccatgtgggaccaggagaggaacccacagtgctctgctttcagcagagatctgtgaagctagaatgtcaagggccagggaagtggaaggcccagaaccttcaggggttctggttgccccagagcaagaagaagaagtggagggagaagccaggagagaattgcaagatgacccttcaggtcctcccagctctagtggtctctgttctgaggcttccggaccctataagagtgagcaggagggtgcaggcatttggggatggagcggcatgaagtgggctcctgggggtcagcagagcagccaggcgcaggacagagctgctccaagcaatcctgatgagagctggcagaaggctgaggtcggtggggatagtgaggagggcatgggtctgggtgtggtgggcgagggtgtctcgcccatctctgggttggacaggtgcacctggtaagtagccaggccctgaggcgtcaccgtaggtacctgcagattctggaatgtcagcaggagccttgcctgcccacctggtggaagctgtgggaggaattggagcaagaggcggtgtgacttgaacttgggggctggaagtggaagaagaagtgagagggagcagacccgagagagattcaggaggcaggatagagaggactgggtgatggattaggtgggcaagggtgggatgtctgggggagggtcagggcagaacagcgtggcccaccctgggctcgtacagggctggatttcagtgccagctgtgtggtcttcatttcctgagcctcagttgcctcatctgtagaatggggagagggtggctatgaggatccaggagctatgggctcagtggctggcgtgctctgcacggtggagcctcagccccagtcattggggtgtggacgatgggggagctgaggtcaagtcaaggcctctgctcacgggcagcccctgctgccaccccacagcccgtagaaagagttccggataggaccacaggaggcctggtgggctcagcacacagatgatgaccttggcacacgacctccctctcctggtatcctcctgcctgagacggtgctggggcagatctcctcagaggtcgataggaggatgcagtgaggtggccccggccgaggtacactcggtaacagatcatcatgtgcagtgtcggcgcaggcattgggcacctgggcctcattttctcttccatgaagtggatgttctcccctcgagggttcatgccgggtgatcaggagaccatgatttgggcagctcactccccagctggcagccgggctaaatctcatcagtgcccatttagatctggtgctccgcccttgccccgaagggacaggctgcctgcagagagagccgggacctccacattttctgctgaggctccttttcccagcattggctcctctgcagctgctgggccacagccagaggctgtcagagatccaagggagtcattgccagtgtccttgtctaaggaggatgggccatggagaagccctccctgcccgctctccacccagatctgttgacagccacccctcacatgcccagggcctggagggtcccagcaaggctgagactatgagcagctgtcctactcacatacccatcccagcatccaggtcagcccctttgtcctggggtcctcaaggtcactggcgcccttccagcctgctggccttgggccagcctctagcccctccttctggatcttggtcttctcagatctgaccctgtcacctctttccccgaccaggccccttcccctctggtgcctgggcagcctgggggaagtatgctggaagcagcgtaatgatctggcaaggcagaggagacagcacgtcttgaaacatttttggggtcaaggactaccccatttgttccctcactcccacctaggtcactgatgtgcattagcttggactgttgtaacaaaatatcacagacagtgtggcttaaacaacagtcatcactttccacagttctggaggccagaagtccacaatccaggttccctcagattctgttcctggcgagaacccacttcctggcttgtagacggctgccctctcactgtgcactcacatggcattccccaggcgcatgtgcacggagtgaaggagcacgagctctctggtgtctcttataaggacactaatcctggccaggcgcagtggctcatgcctgtaatcccagcactttgggagactgaggtgggtggatcacctgaggtcaggaattcaagaccagcctggccaacatggtaaaactccatctctactaaaaatactaaaaaaaaagccagatgtagtggcgcacacctgtgatcccagctactcaggaggctgaggcaggaggatcgctggaacctgggaggcagaggtcacagtgagccgagattgtaccactgcactccagcctgggtgacagagccagattctgcctcaaaaaaaaaaggggcgctaatcctgttggatcagggccccacccttatgacctcatttaaccctagttacttccccaaagtccccatctccagatgcagccacactggaggttagggctttaacacatgaatttggggtgacacaaacattgagtccataacggatgggcagcttggatctgtcaggggcctgctctgcaacagccactgcttaagcggtcactgattcactccttggaacaggctccaacgtgggagcagcggttaccccattttacaggccagttgagtgaggctccaagaggtaaagtcacctgccagactctcattgttcaggagcagcagaggtaggatctggacctgatggagtctggagtcagcacccataacatgtcctcctggaccttggggatacactgtgagcaggctggctggggtctgccagcacagataggtgccattctgttttgcatactatttcagggggtcctgaacaccttgaagcaggtggaggcccctgctccagactgggagctcctggagaggccaccctgtgtctgtgtggttctaagctggagccacatcgaatcaggatggggctccagcacccgacagtccccatcaaatttcacaggttttggcgccgtcgggcaaggctgacacattgtcttggaggaggcccaggaagtctggccttagggtcgcagcctgagtttcaggcagatagggcatgagattccagcatttctgcttcgagccccgtggtagatccctgtctccctccttccccatggcctatttctgtctcatttattcattaacttcttgaacattcgtgaacacctgttttgtgcacagtgctgggttctgagggtgcagcaatgaagaaggccaacccagcagcctccattcctgcactgtgaggcgggcaagcaacacaccaatgggacggtagtaaatgcagcacccagggggaggcacctaacacagtgggggattaggggaggcttcttggggagaccagaggatagctgatgagtttcaggcaggacaagaggcttaaaccaaggtctgcgaggtgggagtcggaggatgtcattgtcgcggggtcaggtacaggctgagctaacaagacacacaggaccaaacccctcaaggtcagcctcacagagcaggaactcaggaagaaagcgtttttgtttgtttgtttgtttgtttgtttgtttgtttgaaatggagtttcgctcttgttgcccacgctggagtgcagtggcaacgatctcagctcactgtaccttctacctcccagtttcaagagaaagcgtttttttgtttgtttgtttgtttgtttgtttgtttgaaatggagtttcgctcttgttgcccacgctggagtgcagtggcaacgatctcagctcactgtacctttctacctcccaggttcaagagaaagcgttttaaaaaaaaaaatcattccagctacttgcgaggctgaggcaagaggattgctgcagcccaggggtttgaggccagcctgaacaataaagtgcgaccccatctctgcaaaaggaaaacaaaaacagtcattgcaggctcccatcatagcagaaaattttccaagagagctggcaggtcagaggcagatctgggtgatatgagctattggtgtgccaaagtgtggcttttatttgtttttaagtggtatggcttgcacactatgtgtgtgagagaggacaacttgggcgggctgtccaatttcagggatccctgtggctgtgtccccagccctggccgctgggggctgtggcaaggtgatgcttgttcagggcctgggcctggctcctcagacgctcagtgcctgcaggcagtcctgcttccccgaagtaggtgggtacctctgggggcaccgtgcgatcccctggctggcttagtggtccagacagaaggggggacaggggactccagtgctctgtgcctaaggccaaggagatacctagaagttcagggagaggaggggtgggagggggtcctagcaacatctggtttaagtcggagtcactggtggatgtgtctggcacagaggaggaccccgtggcagccctggaagcggggcattctgatcaaaccagggcatcacgggcagaagcctctgtaatgtgccatcccaacagaagctggggccctgtatggcatcgatgtccctgtcagaccaggacacgtgggccggcagggccaaggatagggagagcagagcagtagaggctgcgtcatccctgggatgcagtccccatggaggggaagaatgatgacagcaagggacgttggtcagggtcctgctcggtgccgggcactatgctgcatgtcacagccactggcacaagactgtcaggcggaggggcacagggatgtcagggcagcaggtcgtggtgacatccagctcagataccaggacactggtggctgccatgacgtgcagccaaacagggagctatggctgtgctctcacggtggtaccatttccactgcagtcccaagcaggttagagcgtgaggccgaggggccctggggacacttggatcagtccagtgtgttcagcaggtgccacggttgggtgtccaggcctcccagcactggctaggtcacccagcagtgttcccgtgggtctccaacaggctccaggccagtgtatcagctatgtatgtcctgggcaagttggccggcaggtgtgtcatggcatcatttaggtcagaaggagcaagggtagaagtgtcagggtgacattaagaaaccccctactgagtgtgtcagggtgaccttcacgttggagagaagaactggtgtccctggagagtggctgccaggccttagggtacacggggcgggtgcagttcacccagagggctgccctggcttgctggggctgtcgcaccactggcctagggaggacactggaagggacgcccgtttgtgtcagagcaagaggattggggtagggcaggctttggcccatgggcaccttcctgggggtggcctggagtcaggaaggcggtagccattcctcctgacctggcacgtgcacaagactgcatacacacacttgctcacacacagtcacaccacacacaccacgtgcacacacacgcagccctccccacttggcttccgaaacgtgagtcactcagatgctactctgctgccgtcttgccccctctgctggcagccctgttcctcctaactccaccagccctggcctcctccgcctcctggagagtcagagccgatgggctagtttgggccacacagggtggggccaccctgagttctgccagcatgcagactgtaggtggggagccgggagaagagctatgttgcctgcctctgggaccctggggctacagcccacgagtgtcccttgcagagcccaccagggtgccttggaggcccatcccagtgccaggctgttcttcccagatgggacagctggggccacaggctgccgtggcagtgctgggctttctctggacagctctcccacctctgcccagggggcccggggggccagccccctgcctgggtcagcctctccctgcctgctgctctcctctggcccatccagcttgtatgtagattttccctcacgtgtgtgtgtgtgtgtgcatgtgtgtgtgctggtgagagtgacagcgggagcagggatgtgagacctgcagggtggcagggctcatggatgactggcggggtgcattaagtgctcatgctcgtgaaaggcacctcttcttgggtgtgggtgaggacaggtgtgactgcgcatgcaggtatgtgtgaggagaggggttgtggggagcatgtgcgcctgtgaggggaggctttccaactgaagtgctgcctcccccgctggccagctctggagtcctccatcctgtctggtcaggccccccccaacccctgacctggcactcccattccgttccatgtccacaggctacatccagaagatcaagtcgggagaggaggactttgagtctctggcctcacagttcagcgactgcagctcagccaaggccaggggagacctgggtgccttcagcagaggtgcgcaaggaatgggcctcaccaggttgggggacccttaccaccctgaggggtagaggccaggagggtctgggcattgggctcccaggtgccacaccggccttcggggtccagcaggtggcagcacagccccttcctcaggcttcagaggctgctctgctgggcagggccagggccacacagggaggggggctgcagcactttcttcctggcatcatctctaccctggggggcatggtctcttgtgtgtctgtgcacagatgtcctcatcccaggcccaccaaggtgggtacatcctgtcctctgcctcttcctttttgtggtttaaggttgagggccctgagagtcccagggcctgtcccccagaatccctctcaaaggtggggaaaccaggggtgagaggaggtggccctgagtttaggcctgtctggccaggacagtggaaatcagggacagaggggactaggcctcctcctcttcctcctcttcagtcctcggggtctacagaaaaacatcagggagaggccaggatgggttgcagggtgtggtgtgcaggtgtcttagtggggtggggcggcagcatggggccagcagctgcccacctcctccgaggaggctggtgggacagatgacatggcagggctgggaaccaggcccagggagacgagttcactaccgaagtggcccctaaatgcacggcggcggccgtagccctgcctgctatccttcatgctgtcctcgggcttcccagggcctccttaatggccctgccacccccagctgggccgccgctcagcactggcaataaacatggtgacggatgagtgtggacgagtgtgaggctcagcgcaggcaggagccccatctgtcgcggctgccacccgccctgcctcatcctggcctctgccagcccagccctgacacccccaccgcccctcctggctcccaggtcagatgcagaagccatttgaagacgcctcgtttgcgctgcggacgggggagatgagcgggcccgtgttcacggattccggcatccacatcatcctccgcactgagtgagggtggggagcccaggcctggcctcggggcagggcagggcggctaggccggccagctcccccttgcccgccagccagtggccgaaccccccactccctgccaccgtcacacagtatttattgttcccacaatggctgggagggggcccttccagattgggggccctggggtccccactccctgtccatccccagttggggctgcgaccgccagattctcccttaaggaattgacttcagcaggggtgggaggctcccagacccagggcagtgtggtgggaggggtgttccaaagagaaggcctggtcagcagagccgccccgtgtccccccaggtgctggaggcagactcgagggccgaattgtttctagttaggccacgctcctctgttcagtcgcaaaggtgaacactcatgcggcccagccatgggccctctgagcaactgtgcagcaccctttcacccccaattaaacccagaaccactgctctgctctcctgtgtctcatttctcctcagggaagcatagtggggaagatgtcgtggggaggggatcatagcccccccatcctaagggtcccagctgcaagttctcccccgaggcttccccttgccctgggccagggggagtcacagcagctggctcttggggacatgggcactgtccagctgcccagcaccctgagatctgcttccctgccatctcaggggcttccagaaggttcgtgggtccaacccggcacctggcccagcacccattgcagctgcagttaccatgacaacagggccctcccggactggagggggctcctgcagggagggggatgggagcagacatggcttttagtgcctgaaggtggagcagagggaatcctggggtgggtggcggggagatggggtcccccgccagtgtgggggctgtggatgtggcatgcctgacccccatcccctgttcagtcggggggctgtgggtctgatggagaagtggttattcctgcatgccctgttccccctccacttgatggggaccagcccagattgcgggggtgcctggctggcagagcttagggacctgagcaactaaagcccggccccaggggacctcccctcccccaagcgctgagtttctaataaaggccaagcctcataaacaatcacctgtgcccgctcccatctggctggcttcgggagcaatcgctcattcgcctgctgcctgcctgccggagcatttgtcattaggaaggtttaatgggtttcctctcagctccagagggctggggagagccggctgcatggatacaccgccaggcagaatgttctcccatcgcctggtggaggggggttgggagtgaggcagccatgccaccattcacaccaacagttggatgtggggttggggaagtgactgcacccctcctggaacagtagaggccctgggtctggaaggatcggaaattagtggctggggcccagagggtttgctgagttccactccagggtgaagaatgggctttgtgtcctgaccatcagcagcagggcccagggaaggctgtgcatcgttctgtgtgggagccgctgcccccacccgtgtgtatgtgtgtctgcgtttgcccaagaatgtgtggggccatgtgactggtcgtctctctgtcctgtgcattttgggagtcctccggttctgagagtcctccggttctgagtgtgaccacctgcccctccaggtacccccttcccttgtctgtctgtgcagtggccaaaacccaaatgagaatgtcgctgttaggtaaacatgcctccagagcccacttcggggccggtgattcattattaagcagctgcgcattccctcacctcccacccaccccctcaccccctcctgtctagaaccagggcataaatcccaggcctttaggatggtgacagtgtagtcttccctagtgccacttacaggcacctcccaggccagacccgccccagggggtcagtctctacgtgcccctggcttctgtggccgctgggcagagctggagcaggtcaccttggggtaaacggtattactgccccaggacaggagttggcttcgctgtgcccacgtccatgatgagaggggaagtcagtgagttagcagtggatagccgaagacgcacacagattgatcctggcctgggaaatgttagtctgcctgcccatccttgtttgtaacaaaagccacaaactcaaaaggagctctgagcgtgtgtgtgtgtgtgtgtgtgtgtgtgtgtgtgtgtgtgatctctctgaggacctgatacagatgtgatggacacacccacacccagccctaatctcggtgtgaggatgtggctccccagcactcagcatagtgtggacacagattgtggacctcagcagcctcaattctccaccttactttaggagaatccagtatctaaggccgataaactacctcgtcccctcactgtggagactctctgcctccaaataaatgtgagttgggggggatacagatgttctaggtgtcctggctttgtgctgcttttcatttcttcagcaggtacagggtaaagtgcctctccacatgctaatccgggaattaatcctttttccgatgtcaaacatattcgcttaaatggaaattaattgcttttcttgaggatttctctaaaaattggttttaaatgagtacattaggcagtcccatttattattcgttggtttcgttcccaatatggccccggtatccgagttcccggagatgccagcacggagcggagatgatttaatcagggtaaccattaattagagatgaggagagcctcccccaggaggagtgggagtgccccctttgtggcctcagcagggtggcggtctgggccaatagggctctttaaatgattgtttctgctctggattcaatagggaccaaccactggggtcaacatggggcaggatcacctgggcagcaccccctaccttcattcttggtccctcagccccaagggtgacgctcctcacctttcttgtaccccttccaactagcctggctgcaccccttaggtctgcctcatgcaggccttcagacaggcctggctcgtataaagccctcatctggttcttccccttctgtgacttcccttcccctgcctttagccagatctctaaggctgctgaggacttagcgtctccttttttattttttagattgagacaaggtctcactctgtggcccaggctgcaatgcagtggcactcatggttcatggcagcctcgaactcttgggttcaagagatcctcccacctcagcctcccgagtagctgggactataggcgcacgccaccatgcctggctaattttgtaaaatttttttagagacgaggtcttgctatgttgcccaggctggtcttgaactcctgggctcaagcagtccttccccctcagtctcccaaagtgctgagattacaggcatgagctgctgcatccagcctactcctagttcagtcccttcctgtctccctcatactcttctttcctgcctccaaaacttcttgtcttttcctctccttcccctccaagaattctggtcccccatcaagggctgtccctgcccaatccctcctgcaggcaaacaggctccaggtgtgaggtatgagtgtgttcaattgaaggcacctgagtgcccctttaaaaggctgtttctagcttttttgggattagtttactcggcacaaatgtgacttgtctaaaaacgatttttgaaattacaaagcaacaagagaaaaaagaaaatggaaaaattcagctgggccctactctttcatactcagcttcttaaaagccagctcgattgttaaaaacccattaaaaaattgccagactggccgggctcagtggctcacgcctgtaatcccagcagtttggaaggccgaggggagcggatcacttgagcccaggagttcaagaccaccctggacaacatggcaaaacccccatctctactaaaaacacaaaaattagcctggcatggtggtgcgtgcctgtaatcccagctactcggaaggctcaggcacgcgaatcgtgtgaacctgggaggtggaggttgcagtgagctgagatcatgccactgcactccagcgtgggtgacagagcaagactgtctcaaaaaaaaaaaaaagaaaaaaaaaattccagacctcttagtaatgcatcaacagtgattgcagagtggcaatccagtgacgggagaatactcatttgaggccagttttcattgctgtgctagaattctcggttgttttgatcaaactgcttttaaacgaattgctttcgatcaaaacaactttggattgggtctcctcacccatctccccaaagggctggccctggggaaccccttccccccagttcgcttaagcttgagtcatggaataaggggatcctcactggagatgggtctccaggcttggacttcggggccacctccacctctgtcgccattggacacacacagtcaccgaagcgtcaaatgtcaaaggtcctgtttattccggcaaaccggaaagaaaaagtgtaaataaaaaaagaaacagatccatgcactcaactcctgggggtgggggtgggggtgggagtgagggatgaggaatgggtgggaagcaaggagggaggggtggaaggacagagagagagagacagagagaggcagagacggaaagaactggagaaccagagccataaaaagaaaaagacatccataaaaaggcagaaagaaagaagtggtgtattaaaagcagagatcaataaaggagaagaggggaaattgaaaaaatagacagaaatacataggcagagaacaaaagcccagcaaaaaggcggggagaaagggcgtgacagagacagagagatcacccttgagggacacaggcagaatgaaaagggcccccagcccccagaggccccccaggcagcagcccgagccacagcattggctcaggggtccccagaggtgctgatgacgtgaaacagggtgacattgtagagcacctggtggccgttgttccaggtatagagggcgcgctcccgggggttgtaatccagcatcgagatgtgggaatactggttgtggaagggcacgtccgtgtactcgtaactggacgtgttggtaaaataggcgaagtagaccttggccccagccaggtgggagttggtcacgtagagcacaccgcagatcatgaaggcctcgccagcgctgcgcttggggtagccggtgtcccaggaccgcatgacctcgagggtgtgcgggtccagccggctgaccacgatgttgcccgcgttctggttggtggtgtacacagcccagagcccgctctcgtccaccatgaagtccatgtcggagaagccgccccaggagtaggggaaggtgttgttgtaaccggcgcccgggaggctcctctgcaccagcacagagcgcgagcggaagtggtatttgaccaccacgttgctctggtacttgttatagaacagggagccgttgtacaccacgtggcccgtgcccgcccacggctggggcagcaggtgctggataaagttctggcctttgatgaagtctcccagggtacggaactccaggacccggcggcctttgtaatagccatccatgtaccagacctatggtagcagccgctggtcactggggggaaccaccaccaacgacccaagggtcccagcaccagctacagccattagagttcaacagtcactaagtggtcattagtcatgggaactctgttgaccattcattaccaattatggccctagtgtgaccatgatcatctcctggtgacagcattaaccatgggcagtgaattcaagtgacgtcttatcactcaatggctgtccagtgaccactaaccacccaatatccaatgaccagggaattcctgggcccagtgagtccccaggggctgcagtttcttggggaactgcatggccccagtaggacccaaatcccagtgagtgctattggtcttttttttttttaagtaatttttttttttttttttgagatggagtccctctctgttgcccaggctggagtacagtggcgtgatctcagctcactgcaacctccgcctcccaggttcaagtgattctcctgcctcagcctcctgagtagctgggattacaggcgcatcccaccacacccggctaatttttgtatttttagtagagatggggtttcaccatgttggtcaggctggtctcaaactcccgaccttgtgatccactgtctcagcctcccaaagtgctgggattacaggcatgagccaccacgcctggcctttttttttcttttgaaacaaagtctcactgtttttcccaggctggcgggcagtggcacaatcacggctcactgcagcctcgacctcccaggctcaagcaatcctctcacctcagccccccggaatagcagggactacaggcacaagtcaccacgcccagcttatttattgtatctttagtagagacaaggtctcgcaatgttgcccaggctagtctcaaactcctgagctcaagtgatctgcctgcctcggcctcctaaagtgctgggattacaggcgtgagccactgcacctggccactattgatcttaaaacagaccctaagtggacaatgctccatcccaaaggacccagggaactgcagcccctggggagtcactgggcccaggaattccctggtcattgaatattgggtggttagtggtcactggacagccattgaatgataagacatcacttgaattcactgccatggttaactaacccctgtcaccatgaggtgaccaggcgtgtcatcaacatcattgttgtcatcatgttaactagcatttgttgttgtttttgttttgttttgttttgagacagagtttcactcgtgttgcccaggctgcagtgcaatggtgcgatcttggctcactgcaacctctgcctccagggttcaagtgattctcctgcctcagcctcccgagtagctgggattacaggcatgcaccaccatgtccggctaattttgtatttttagtagagacagggtttctccatgttggtcaggctggtctcgaactcccgacctcaggtgatccgcccacctcagcctcccaaagtgctgggattacaggcatgagccaccatgcccagcctcatggatggttcttgtgtgtctaagtgatgggcagtcatgaccatggaagctactagaagtccgaaggtcactgagcagtgcttggtggaagaggtctcttgtccttgggagggcattggtcattgggtagttacttggacgtcagtagtccctgagaactggtcagtagaactcagtaaccattagccactatacagacactggaggtcaacagagtgggattcacaaggctgcaaagcccttggtcacttgggggttactggacagggaggtccaatggccctgggggatccaggacactttgggctacaagacagtcaccagtgtggactccctaggcacctatgggcagtcaaaggctctgtccctcccaggccctgaccccaggggtgggcgcagtcactcacccggctatccgcactgggggccatcgtgtcagtcatccaggagccgaagcgggaccccatggcccgaacggtgatggggttactgaccccggtcagcttcccacagcctgggaggcaggaacagggggaatgaggatggggaaatgaacagcccaagagaggccaggcaaagatgaagtgctgtgatcaagttgggaaagctgggaccagggatgagggaagactcaaaaatctggtcccaatatgttgttcagttgtgagtgaggggttagaggccaagggtcagggccatttccagcttctggactcaagtgtagccttaggtaggaaggtcaagggttgaggtttaaaagttagaggtcaaaactgtgtccagcttctaggcacaaacaggtgatactggagttgggtgtggcagtcagagatcaggggtcagggtcaagggccaaggcatacccagcttctgggcgcaggcgtggagccgggcctccagggccatcacccgttgctgcaggtcctcatacccgtaggcacccatctcctcctgaatggccgccagactgccggagagattcctcacctcctcccgcaagcgtacaatggtccgcgtgtctgccttgtactgctccaggaccgagctcaggggcaacagttccgtcatcctgtccttcagctcctgtgcatcaagatggaaccatggccaagcctgacccctggcctttgacccagacatgactccaacctctgactcataacttcaccctttgtctttgatgcacacctggcccttgacatgtggctcatattggaccctagattcttcccagacatgactccattgtaggaactaatggataccaaatcccagtcatttgtttgacctctggtctggacacaggaggacccacctggaagctcttggccgagagggacccatcagctgcccggagccgcgcatccaggctccgcatgagggtctccatgccgcgtacatactggaggtcgcgatacgtccgcaactcaaggacctccatggactgggagacgttctggacctaggaatggggacaactgaagggaccagacctccttccccaaatcccaacccagagatgccacagacaagagctggcaggaacagaggctgtacaaacaccacaccgacgaggccaccttctcctcccctgagcttaccagcagcctcccaattgcgtgcccaatccatccatccatcgctccctccctactacccactggctcccatctggtccacctaccaccacctctcacctcctccctagtctcccagttccaccttcatcccctgtagtcaattctctacacagcagacagaaggaactttcaaaacagagattagatcaccttcctcctccacagatcctgtgctggctggtcctgcccaccccccccgcccaacccacttcctctctctttgttctcacagactctaagctccttccttctgcagggtctttgcacttgctggtctctctacctggagtgctgttcccccaagttcccatggctggctccttctcatccttcagggttcagctccagcgtcccccactcaaagcatccttccctgaccaccctgtccggtagccgctcactcactctcctcttgcctggtcatttccttcccagctgtgactatgtagaacattcttatccatctgcctccttcaggtgggaccctcagaggcagaggctgcgtctagcttgtccacagcttaacctccagtgcccagcactggcctggagtagaggcccaataagtattttttggctgaatgagtaaaataaacttcccttgccctggcctctcctgacccaacctgagagcacccagctcccacctccacctggctacggtgaactccacctagataagttgaactccccctggctaaggtagactcccatctgactaaggtgaacatctggctaaggtagccaccttgttaaggtgaactccatctctggcttaagtagactctcacctggctaaggtagactccagctggctaaggtgaacacctggctaaggtagactcccaccttgttaaggtagactctcacttggctaagatgaacacctggctaaggtagaccctcacctggctaaggtagaccctcacctggctaaggtagacctttacctggctaaggtagactctcacctggctaaggtagattcccaccagcttcacctgactaaagtggactctgcctggctaaggtaaactcagtcagagttaccactggatgcttgttgaaatacagactttcctgtacaattattcacatgacacttggaaactcccagaaactcagcagcctaatacccaccctgaacgccacaaaacatttttacatactcttcccttctccacagtttcacgtttcagctacctgaggccaaccacagtccaaaaatattaagtgggaaattccagaaatcaacaatttgtaagttttatttatttatttatttatttatttgagatggagtcttgctctgtcttgcccaggctggagtgcagtggtgccatctcagctcactgcaacctccacctcccgggttcaagcagttctcctgcctcagcctcccgagtaggtgggactacaggcacacaccaccacgcccggctaatttttgtatttttggtagaggctgatctcaaactcctgacctcaagtgatacacatgcctcagcctcccaaagtgctgggattacaggcgtgagctaccacgcccggcccaggggactattttctcttgaccatgatcagaggtagaaggaaacttttataggagcctcttgaggtggagggttagaccctccccaaggggcacagaactccttcttagtaggtgagtctggtgaactgcaaagctgggtgggacatgcctggtggaccagagctcacacacaggagactcagatgctgcccctccagtcttccttccttccccccaccccaatcccagtaagtgcttggcttctctcccaaaaaagcattgaacaggcagggcgcagtggctcacgcctgtaatccccgcactttgggaggccaagacaggcaaatcacctgcagtcaggagttcaagaccagcatgactaatatggtgaaaccccatctctgctaaaaataaaaaaattagctgggcgtggtggcacacgcctgtaatcccagctactcgggaggctgaggcaggagaattgcttgaacctgggaggtggaggttgcggtgagctgagatcgcgccactgcacctgcactccagcctgggcgacagagtgagactgtctcaaggagaaaaaaaaaaaaaatacattgaacagatattggataaagtatccatctgggcatggtggctcacacctgtaatcccaacactttgggaggctgaggcaggaggatcacttgagcccaggagattgagaccagcctgggcaacatagggagaccccgtctccacaaaaaatataaaaattagggcatggtggtgcatgtctgtagtcccagctactcagaggctgaggagtggggattgcttgaacctaggagtttgaggctgcagtgagctgatcatgtcactgcattccagcctgggtaacagagtgagaccctgtgttaaaaggaaaaaaaaaaaaaaaggacctgcctggagaggagctggattatcagccagctctgaataatttgcatagctggatatggccactggctgacctggatggggctggagggcggggtgagaactgggagattttcccagctgcccccagggtacctggaaggttctcaccttctccatcagttgccgcagctcccgactcctgccatctcgagagcaggtactctgcgctgggatcacggccgtgcagatgcatttcccgtcaggggcctgggctgaggtgtacagctgccagccctcttctgggttctggaagagagtctgcaaagaggtgggggtcagagaccggaatcccagtgagggtctcgcctcgccctcactgggacaggaagggggcccaaggaaaccacagatgccctttgctgggctccgggcatatgccagtgcctgttgtgtgtgatctcaggccctccttaaggagcctcatttcacggatggcaagactgaggtgcggagggcttaaggaacacggcaaggaattggaggactcaaatcttctccaagaccagaattcattctctcacacagatttgcacgcacacaacactgtctctgtgactgccattagaacagagatccactcaaataacccccaaacctggacctcctctctgcttccccagcccacagtgacatatcggctctggagctatctcagggccacttaatgtttttttttttttttggtttgttttttgttgttgtttgtttttgagacacagtcttgccctgtcacccaggctggagagcagtggcgcgatctgggctcactgcaacctccgcctgtctccaacacctggcctccactccagcctgggtaacagagtgagaccctgtctcacaaaaaaaaaaggatctcacctcaggtgatccacccgtctcagcctcccaaagtgctggcattacaggcgtgagccaccgtgcccggccatcagggccaccaaatgttaagtgcaaccctgctgtgcccccacctcacctggagccacccaggcaaagtgatggcagacaaaatgctcagataatccagtgaccaattatggctttgtttcccaagccatactccttccaacactggtaatcttaccaggtgtgctgggaaaaggatgctctgtggtcaaataaatgtgtgtcactgggtgaaacaagttttgttactgcaggacttatcagaggcttagaaatgcaaataagtaccagggaactctagacacaaatcataaacttccaaactgattagaagacacccctgaggcaggtggatcacctgaggtcaggagttttgagaacagcctggccaacatggcaaagccccatctctactaaaaatacaaaaattagccaagtatggtggcgggcacctgtaatctcagctacatgggaggctgaggcaggagaatggcttgaacttgggaggcggaggttgcagtgagctgagactgcgccactgcgctccagcctgggcgacagagcaagactccgtctcaaagaaaaaaaaaaaaaaaaaaaaagaagatatccatgagagtctcttctgtcccaggcatagggtctgggataggatcaaggaagagaaggaatgaagaaaacatctggtggttgtccatggagctactaggagagacggacatcaaccacttaatgccagtgatacttctagaaccacatgctgcagtgagtgctttgaagaagtagtgcagggagtaacagggggtcttccctcaggctgagggtctctgaggaggtatccaagagaatgggctcttgagatgaacttgagggacgagtgagacagaagaaaaggagaaggcaggggacatttctatcattacaaatcctgatcaatgtctggagggacccaggaatggtggctcacgcctgtaatcccagaatttcaagaggctgaagggggcggatcactgaaggtcaggagtttaaggccaccctgggcaacataacaagacctcatctatactaaaaattaaaaaaaaaaaaaaattagctggatgtagtggcatgcacctgtggtcccagctactcacaaggctgaggcaggaggattgcttgggtacaggaagttgaggctgcaatgagctatggctgtgccactgcactccagcctgggtgacagagtgagaccccatctcttaaaaaaaacaggccagacgcggtggctcacacctgtaatcctagcactttgggaagtggaggcaggtggatcacctgaggtcaggagttccagaccagcttagccaacatggtaaaaccccgtctctactaaaaatacaaaaattagccgggcatggtgatgtgcgcctataatcccagctacttgggagcctgaggcaggagaatcgcttgaacctggcggggtgggggcagcgagccgaggttgcagtgagccgagatcacaccactttactccagcctgggcaaaagagtgaaactctgtctcaaaaaaaaaaaaaaggatgtggggggacgtgagggttgtggggtgactggcttgggcttgcacacgtaggcgtcgtttgttcaaaacctgaagtctttgttcaagacctgaaggaagtgagggaggagccatttggatgtctggggaaggggttccaggcagagagaacagcaagtagaaaggctgaggcaggaccatgcctggtgtgtttgtgaaacaaggaggaggcccatgtggctggagcagattgagtaaggggtaagtggaggcagatgagagaagggaggtgatggggcaaggccttgtgggaagcagtgagggctctgggttctgccctgaggaaggtgggagccatggagggttctgtgcagaggcgagacgtgaccttacttgggtgttcacagtgacctctggctgctctagggaacgagggagggaggccagggcaggggtgactgcacagatccagacaggtgatgatgggtggtggccatagaggcggtaaatggaagattctggtcctattccaggatgcattctgacaggcatggaagaaattctgattaaaaaaaccccagtgttttacagagaaacaaagcaccacaatcattgatcatttgcacagccattactagatctcccagcagaatcggtgccgtgagctgcagcacagataaaccaagctgtgaattatgagcgatcccggggactccaactattagcccacctttttctctcccactcaatcgagtctttttttttttaaggcttattggaatatgagcaaatgatataattgtacaaattatacagatgagcttgactcccccactaatctataaggaaaacaaaccattcataaacgccagctgaaactattacagtcagtcattcttcgagcctttgtacacccttcctaaatggggggaaccccctctttgtaagttgcacatcctcagccctggcagcggagcacagtaactcactttctccgccttccttgtactcaggtaggagctgggtggagctaacattcactgcaggtgtgcccaggattggccacagccaagagctttctctggtggtcatatcccaccctgcccttgcatggggccagcagaaaatacacccagcaatcctcagagatgacctacaggcattcgtgattaataccacccctcttgcctctccagtgggaaagaactcgaaggtgtatgttcatgaaatcttccagggcaacccattagatttacacctcagttgtccacagcagcaacctgctcattacttctcttttatttattcgtttattttattatttttcatttttgagacagactctcgctgtgtctcccaggctggagggcagtggtgcgatcttggctcactgcaacctccacctcctgggttcaagcgattttcatgcctcagcctcccgagtagctaggattacaatcacccacctccatgcctggctaatttttgtatttttagtagagatagggtttcactatgttggtcaggctggtctcgaactcctggcctcaagtgatccgtccaccttggcctcccgaagtgctgggattgcaggcgagagccattgcgcctggcacatttatttatttttttaagatggggtcttgctgtcgctcaggtctgggtcttgctgtcacccaccactggagtgcagtggtgcaatcctagcttactgcagcctcgaactcctgggtttaagccatcccctcccacatctgcctcctgagtagctgggcctacaggcaggtaccaacacacccagcttttttttttttttttttttccttttgtagagatagtcttgctttgctgcccaggctggtcttgaactcctgggctcaagcgatccacctgcctcggcctctcaaagtgctggtattacaggtgtgagccactgcgcctggcgtactcattaagtctcccggcacgggtttccttcacctcctctctcacttcactgctcccccactggttcttcctggggtatcttaggtggatacctgcacttaaatcctccctgaaagagcctgacctaagacaacaaggatggcccagtacaagaggaataccccaagaaagcctgcccctttggttctgggaggatccagaactactctcccacctcccttcttcttcttctcctctttttttttttttggagatggagtctcacttggtcacccaggctggtgtgcagtggtactatcagggcttttggcagcctcaacctcctgggcttaaatagtgattcctcccacttcagcctcccgagtagctgagactaaaggcctttagtctcaccatcgcacctactaatttttaaatttttttgtagagatgggagtcttgctatattgtccagtatggtctcaaactcctgggctcaagcgatcctcctgcctcagcctcccaaagcactgggattacaaggcatgagtcactgttacctctctgttttttcttttttttttttttttttttttttgagagggagtcttgctctgtcgcccaggctggagtgcaatggcgggatctcggctcactgcagcctctgcctcccaggttcaagcaattctcctgcctcagcctcccaagtagctgggattacaggcatgcaccaccacgcctggctaatttttgtatttttagtagagacagggtttcgccatgttggccaggctggtcttgaactcctgacctcaaatgatccacccgccttggcctcccaaaatgctgggattacaggcatgagccaccgtgcccggccctcccttcttgataaatctcattcttaaaaaaaaaaaaaaaaaacaaagaaaaacatcaaacaggagcccaagcatccctgcccctcctcccctggctctagtccccaagcaatttggatagaaacccccaaggaatatcttttgtgcagagacaaagccgccggttcaacgtaattaacatcttcctacattgcctagcgtgtccgttgaagcaaataagccattttctctcgacagaggaaatattgaattgtaaaagagaagcaagatttaagtggtgcagagagaaggcctccatggttttcctaaaataattgtctgcgttggacgcatctcaccggagtgttctctgcagcagtgtaattaaatgcctgggttttggctgccagatcgcagcaggcagaggtcctgagttttgcccattgggtttaagttcagatatgcagttaatgcatgtccctaggaaccgctggaatgttctggaatgtaccatgtgctagctctcccagactgggtctagcttggaaacaaagtcaagagttcttggcagtcagaagactagagaggaacagagagtgtcctactctaggggaaatgcttacaacagcaggtgcaagaacacaggcgttctccagcatagaagtctgtggtctagcagcctgtctcacctcggatgtggcagatgtactaaagaagccaacccacttttttttttttttttttttgagacagggtcttgctctgttgcctaggctggagtgcagtggcatgatctaggctcactgcagcctcaacttccctgactcaagcaatcctcccacctcagcctcccgagcagctgggactacaggcatgcaccatcacgactggctattttttttggtagagacggggatctcactacatttcctaggccgatcttgaactcctgggctaaagtgatccacccgccttggcctcccaaagtgctggaattataggcgtgagctatcacgacggccctgccaacccactctctctttgctgagctcttggttcagggtttaatattcctgctaatgggctttaagggagtgaagctatgcactcaagtatctgttcctcaaatgtcttttctggctgaaatcttacaaacacttttgctgaggctgccctaattaaacaccagcctctaaaacaggtccaggattaactgagtaggacacaggcagggaaagctgttcttgctgtcgggccagggatcatcatctcctactactccaccacctatatcttggttcaaaaacaattcctggtggccaggcatggtggctcacgcctgtaatcccagcactttgggaggtgaaggtgggcggatcacctgaggtcaggagttccagaccagtctggccaacatggtgaaaccccatctctactaaaaatacaaaaattagccagacgtggtggcaggcacctgtaagcccagctactcaggaggctgaggcagaagaattgcttgaacccaggaggcagaggttgcagtgagccgagatcgtgccattgcactccagcctgggcaatagagcgagaccccgtctcaaaaaaacaacaataacaacaacaaaaaaaaacaattcctggtgtttccctggggacggaggcattgctacagggtcctggggacaggagaagcattggctatcaggaagtagccaacaggaagagagcaagcgcctgcctcttaataaaatgaagctattattgtgtttgaggctggataatttaatcaggaagccaaggcaccttggggcttacatatttatttgtgccctgccttgttccagagaggactctaagtggtttacaaggatatgtaaaataccataagatagcgccaattaaatatgagagcggggattagatatttttggaggacagcctgccagtccacagccaagccattacagtttctgcaatttgcattttattcggccaatccaaagctaagaattcagcccatggaaactttgtggacagcatctgattgttgcaagggaggttcattaagcattgtttaaaattggacaattagaaattaatttgatcaaaagctattacacatgctagaaaaaaaattttttttttttggagacagggtcttgctctgccacccaggctggagtacagtggcatgatcatagctcactgcagccttgatgtccaaaggctcaagcgatcctcccacctctgtctcctgagtaggtgggactacaggtgtgagccactaaaccaggctaatttttttttttgagatggagtctccctctgttgcccaggctggagtgcaatggcgtgatcttggctcactgcaatctccacctcgagggttcaagtgattctcctgcctcagtctctggagtagctgggattacaggcacctgccattatgcccggctaatttttgtatttttgtagagacgaggtttcaccatgttggccaggctggtcttgaactcctgacctcaggtgatctgcccgccttaccctcccaaagtgttgggattacaggtgtgagccaccacgcctggcccaggctaatttttaaaaagattttttgtagaaacagggactagctatgttgcccagcctggtctcaaattcctgggctcaagcagttctcccacctcagcctcccaaagtattgggattacaggcgtgaggcactgtgtccagccaatttacaaatttaagatgcatctacagaatgagatactatgcagtcattaaaaattagagattaatggagattttaatcaccatctttaaatttatcttattttccaagttttctacaatgaacgtgtattgttcttataaagatttttagggccgggtgcagtggctcacgcttgtaatcccaacactttgggaagccaaggcaggagaatcacttgagcccaggagtttgagaccagcctgggcaacatagtaaaacctcatctctacaaaaaatttaaaaattagcatggtggcacatgcctgcagtgccagctactcaggaagctgaagtaggaggatcacttgagcccaggagttcatggctgcagtgagctatgaaggcgccactacactccagcctgcgtgacaaagtgagaccctatctcaaaagaaaaaaaaaagatttttaaaagtcccttaaatttttttttttttttttggcaagggagaaaaagaagaaaaacaaaagcagggacataaaacagagccagaaacgaggctaagaaaaactcatcccttaaaaacctgaacaatcagcatatggccgggccataagtttggctccaagctccttagcagccaactcagaaagggaaagctggtcatttatgcggttctcagtgtcctgaaacaaaagtacaccagatgctcaggagaaagctcaattatttttggcagggatttctcccacagtcctcccaaaaaggattccacgtgatgtcaccagcatctctccgggcaatatccttacgatagaagtgactagtttcctctagatgtttcttattcctcctgggatggtagagtagggccaactggtaagagcagggtcctggagtcaggctgcctgggtttaagttctggcttcaccattcgcttgctgtgtgacctcagcaagtggcttaacctctctgtgtctttcttagttttttcatttgtacaatggacatgatgactacctacttctctgggttgctaggaggatcaaatgagttcataatatatataagagcaattagaacagtcatcagcatgtagtaagagctacacaagtgtctgctaatactattatttttattttttaagagacagggtgtcactctatcgtccaggctggagtgcagtggcacaatcatggctcacttcagcctcgaactcctgacctcaagcgatcctctggccatcagcttcctgagcatctgggactacaggcatgtgccactatgcccagctaattttttattttttgtagagatgggagtcttgctataattgcccaagctgtgtttgaactcgtggcctcagacagttcctccagcctcagactcccaaaatgctgggattacaggcatgcaccactgcacctggttaattttttaaaatatttttgtagagacaggatcttactgtgctgcccagactgctcttgaactcctggcctcaagcaatcctccagcctcagcctcccaaagtgctaggattacaggcatgcaccactgcacctggttaattaaaaaaaaattttttttttgtagaggtggagtctcactatgttgcccaggctggtgcagcagcacgctcacggttcactgcagcctcggattcctggcctcaagggatcctcccatctcagcctcccaaagtactgggattactggcctgagtcatcacacgctgccctgctattattatcttcataacactcaaaaggccaatttggtaacttcctgaggtcaaacggtgtgagtcttgacacaataaaaaggatctggcaaagtctcatggagttggggttgaggctgtgggatcatgaggcaaagaaagtccaacgagggagagaggagagtgagggatgagaggggacacttgctccatcctagtccccacgcggcccagctggcttccttttccagaatatctccttgctataacctggcagcaggggagccaaggtccttctccatccttacaggcactgaaccaggatgtaggcgcacactgctgtgttctctctggcccatcctctctaattgtctttcccttcccaggtcacaggatgcttattctcatctccaggcctttgcacgggccgggcctgctgccaatccccgcactctccccttcttagggccaggctaactcttccccatccccggggctcaagcgttcaggtctcttccaaaagcagtcttggtggtccctgccacgcgttaccctcctctcaagtcacccgggaggtggaggttgctgtaagccaagatcgcagtgagctgagattgcaccattgcactccagcctgggcaacaagagcaaaactttgtctcaaaataaataaataaatagccgggtgtggtggtgcatgtctgtggtttacagtggctcgcatctgtaatcctggcactttgggaggccgaggtgagctcaagagtttaagaccagaccgggcccagtggcttatgcctgtaatcccagcactttgggaggtcatgtcaggcagatcactctaggtcaggagttcgagaccagcctggccaacatggtgaaaccccatctctactaaaaatacaaaaaattagctgggcatggtggcgagagcctgtaatccccactactcaggaggctgaggcaagagaatcacttgaacctaggaggcagaggttgcagtgagctgagatggtgccactgcactctagcctgggcaacaaagcgagatcctgtctaaaaaaaaaaattatataaaattccgggtgctgtggctcacacctgtaaccccagcacttcgggaggccaaggcaggcggatcacaaggtcaggagttcgaatccagcccgagcaacatggtgaaactccgtctctactaaaaatacaaaaaaattagccaggtgtgctggtgtgctactatgatcccagctactcaggaggctgaggcaggagactcgcttgaaccctggaggcgaaggttgcagtgagctgagatcccgccattgcactccagcctgggccacatagcatgactctgctctcaaaaaaaaaaaaaaaaaagctctttgccaaagcatcactgcctgtaagtgatgtagctggaattcgaacacaggccatctggttacacagtctacactggcttgcggcacctctcctgtcctcctccaagccctgatcacagtcgccattaggagggcctcacgggtgggaatgctggctccaggcctgcctctaccctgggaaaggaaaccacaggggagcggggagttttgtttgctgtgcaaacaattcatccgtgatcctcagaacctggcacaaggtatgtttgttgaatgaggatgctgatgaaccagtgggacagagagcaaacaccttcacaggtctaccgtgaatttctcctttctgccacggagcttgcttctgttgttcgtcctagggaaggatcacctgagattaggctgcagacaggtgcccagtaggctaggcagaggctgtggcttctctctgactgcgagaatggcaggagggccgtgatgaatgatggagaatgtgcctgtctgctatgtctgagccgtgacagggggccacgtccctttggaaagcttgagataatagcagcctgctcttgtcaaaccttgaggtattgggcaaatatcccctgagtgataagcttgacaggccttaaagaagatatcagccaggcgctgtggctcatgcttgcattcccagcacttcgggaggccaaggcaggcagatggcttgagcttaggagttcgggaccagcctgggcaatatggtaagaccctgtctctaccaaaaatacaaaataatttagccaggcatggtggcacgagcctgtggtcccagctactcagaaggctgaggtgggaggatcgcctgagcctgggaggcagaggttgcagtgagccgagatcacgccactgcactccaacctgggtgacagagcgagaccctgtctcaaaagaaaaaaaaaaaaatattagttcacccgcgccatgctggaagcctgggaaccgcctggggcctccctcagcctgagaactggggttttgcctggaagagccttgtgggtcggggaggggtcaggatagaaagtgattgtgaatccacatattcattcatccatccattcattcacctttccacccattcatccatctatccattcattcataaaaccaaccatctatccatctatccatccattcattcatctgctcatccatttatctgtttacccattcattcattcatccattcactcgtattcattcatccaaccatccatttatatacatccatccatctatccatccatccattcattcatctgtccatccatccctccccaagctctactcccattctgaatttcatattttacttaacacttgtagagctcgctcttcttagttgctttacaaatattaccaaaattcaatccttagagccccatctcatggtaggtactaacactagctccattctacagatgggaaaactgagatacagagaaaagtcaagttacccaaattcacagagctgggatttggatgccagcctatcagactctcagccactatgctgggaggacaagagtcacttccttcagggtctcactctgccgcgcaggctggagtgcagtggtgtaatcacggcgcgatcactgctcactgcaacctccacctcccaggctcaagccatcctctcatttcagctccctgagtagctgggactacaggtgcacaccaccacgccaggctaatttttgtattttttgtagagacggggtttcaccatgttgcccaggctggtcttgaactcctgggttgaagggatccacctgcctcagcctcccagagtattgtgtttacaggcgtgagccatcacacctggccaacatttttggttttttaagagacagggtctcaagcagttgtccaggctggagtgcaggggcatgatcatagctcactgcatcttcagcctcctaggctcaagcagttctcttgcttcagcctccggagtagctgagaccacaggtgtgtgccaccacaccctgatactttttttatttttatttttgttttgagatagggtcttgctctgtcccccaggccgtgtcccacattggtgtgatcatggctcactgcagcctcaacctcccagactcgagcaatcctcccaccttagcctcccaagtagctgggactaccgatgtacactatcatgcccagctaatttttttttttttttttttttttttttttttttttgtagagacaggatctcactatgtttcccaagctagtctcgaactcctgacctcaagcgatcttcccatcttggtctcccaaagcgctgaaattacaggtgtgggccaccatgcctacctaatcaacttttacttttggaattattttaggtttacagaaaagttacaacaataatacagagagctcctgtgtacctctcatcctgacttccctgttattacatcttacataaccatgatacacttgtcacaactaagaaatcaacatccgtgcatccattactattaactaaactctagactttattcaaattccccagttttcccacttgagtgctttttctgttccagaatctaatgcaggatcccacgttacactcagtggttatcacatgtctttagacttatctggtctatgacgtttctgtcttgttttttctgaccttgacagttttgaggattactggccagggagttttggagaatgccccactggcctttttttttttttttttaagagagatgggggtctcactatgttgcccaggctagactcaaactcctgaccttaagtgaccctcccacctaagcctcccaaagtggtggcattacagacataagccatcatgcccagccaccaccggcttttattttatttatttatttttgagatagagtctccctctgtcgcccaggctggggtgcagtggagccatctcggctcactgcaacctctacctcctgggttcaagcgattctcctgcctcagcctcccaagtagctgggactacaggtgtgcaccaccatgcctggctaacttttctatttttagtagagatggggtttcaccatgttggccaggctggtctcaaattgctgacctcaagtgatccacccaccctggcctcccaaagtgctgggattacaggcatgagccaccgcacccagtcttttattttattttttagagacaaggtcttgctgtgttgcccagactggtcttgaactcctgagctcaagtaatcctcctgcctcggcctcacaaagtgctgggattacaggcatgagacactgcacccgtcccctaatggcttttgagggcaggaactgtggcctcactttgctggacgtttccccagcctgtaacccaatgcagtagctgcttcagacgcttcctaaatgaacaaatattgaatggccatcactgagagctttatcttcctgtgctccctgttccgcaggcatccctgccagaggctagatctagaagagttcacggcgaaataaaagcttttctcctttcagaaagatttgtttttgatcctttctttgtagacatcaaggattcatttctttaatatttaagggcttttgtaccaaagagaagcagccgcatttgcatcagtctcattttttcaaggcaggcgagagagatctttctagcaagatggggtttcttccttcacggagctgtcacttgatttatctgcttctccttccccagccttcatgcctctggcagggggcagggaagagcgagggttctggaatgatccacagactctgatgtcctctctgccacagcccaaggaagcttaattagaacctcgccaatttgctgggactgaggtggccttaggagctggtgcaggggcctggccggggatgaagatgaattagcagcttttttttttttttgagacaggctggagtgcagtggcacgatcacgactcactgcagcttcgacttccctggctcaggtgatcctcccacctcagcctcccgggtagctgggaccacaggcacttaccagcacatctggttgtttgttgttgttgtttttcttttgttttttgtttgttttttctcacagagacagggtatcgccctgtctcaaactcctgagctcaagcaatcctcccacctcggcctccccaaggtgctgggattacaggtatgagccactgcacctggcctgaattagcagttttatttcctgtccctctgaatagctcaatagctaccacggggaccaaaagcctgccttgggtacacagagcatgtcccttttctaacattagctggtcagaagtgggaatccctttagccatgcaggcctgcaggtctcactgctttttatttctcagccccaggaggccaagctgaaggcagagaatctaaagaagctgtcttcagcgaggtcatctccccgccaccgaggtccctactgctgggagacactggccccaatttaatctcttgcctgaagtttttcagacgtaaaaatgagcctgggtgagcttttcagatagttccttcaacttacaggaattcaatttctggcctggatataaatttgcagccatcagcgcccgtggtaggggctggggctgggcgctttggccggggatggatttctgaaatcaatccgtccgcgtgtggaaaaggtcgccatgggggacatttaacttccatggctggctgaggcatttcacaccgatagccagggacacccctatacaaaatggaagtgtttgctgcgagtcccccaggcagcggctggagggaggcctcgaaggctggacagcacagccaggaggtgacattgatcaacctgccaataacagacagccaggtaccaggactcctgaaaacccacctccaagggctctttcctgctaggtccccatgcgcccctgcgggtggcaagtccactctgggtccaaaccctttatcccttggctacacctccaacacacattccagggtttcaaagaaatgagtctcaaatgcattcaattcccccagtggaggtgggaggacgtggtcattaagggtctcctaggttcgagcctcaggtctgccgtgtgaccttgggctactgacttaaccatcctgtgcctccgttcccccagttagagtatatagctaagaatagtactgatgtcatgaggtggttgttaatatatcagaatggcttaacgtaatgttatggtttgaatgtgtccccgcaaaattcatgtgttggaaacgtaatccattttatttatttatttatttaaagtgaaagcaagtttattagagaagtaaagaaacagaagaatagctacttcagaggctgggtgcggtggctcacacctgtaatcccaacactttgggaggtcaaggggggcagatcacttaaggccaggagttcgagaccagcctggccaacatggtgaaatcctgcctctagtaaaaatacaaaatttagctgggcatgatggcgggcgcctgtaatcccagctactcgggaggctgagggatgagaatcgcttgaaccaggtaggtgaaggttgcgatgagccgagatggtgccactgcactccagccttggcgacagagtgagactccatctcaaaaaaaaaaaaaaaaaaatatggccaggtgcggtggctcacacctgtaatcccagcactttgggaggctgaggcgggcagatcacctgaggtcaggagttcaagaccagcctgaccaacatggagaaaccccgtctctactaaaaatacaaaattagccaggcgtggtggcacatgcctgtaatcccagctactctgtaggccgaggcaggagaatggctggaactcgggaggcggaggttgcggtgagccaagattgtgccattgcactccagcctgggcaacaagagagaaactctgtctcaaaaataaataaataaataaataaataaataaataaataaatacaataaaataaaaataaaaaaagtaacagtgttgagaggtagcacctttaaagatgaggttaggtgaattaatgccattatcagggaagtgggttagttatcatggcagtgggctattgacaacaagaatgattttggtccaatttcctctctctgtgtcacttttgccttcagccctttggccatgggataacctttgccagaggctggtgctatgcccttggacttcccagtctccagaactggaaaaataaatttttttttttaagaaagattaattaattgattattttacagatgaggtctggttctgttgcccaggctggagtgcaatgatgcgatcctgactcatcacagtctcaacattccaggctcagtcgatccccctgccttagcctcctgagtagctgggactacacacgtgccaccacatctggctaatttaaaaaatctgtgtagtcatggggtctggccacattgcccaggtgggtcttgaactcctgggctcaagcaacccttccaccttggctgcctaggtgctcggattacaggcgtgagccaccacacccagccctttataaattacccaatctgtggtagtctgttatagtaacagcaaacaggccgggacacatacgcaacgtgatattcaagggagtgtgacagaattgcctatggaataaaaataagcaaatcggtgctgactgggaacacagaaaggtgggctggaccatctgagcttcaatcttggctctgtgttaccctggacaagtgactctctctgagcctcagtttcatttctctctttttttttttttttttttttttttgagatggagtttcactcttgtcacccgggctggagtgcaatggcacaatctcagctcactgcagcctccacatcccaggttcaagcagttctcctgtctcagcctccctagtagctgggattacagacatgagcacctggcatcagtttcatttctcaaacagggaaactggcagtaggtgatgagatgaccctgtcggcattttgaggctccagcgagctaatacaacggaagtgcttcaagccctggttcagagagagtgctcaggaaataccagtggctgttttccagataggacagcaccctccacagcttccccacattcacagataagcaaggaagaaagaaaaaggaagaggcaattataacagggtgtgataagtgccacgatgcagggaagcacagaacactggaagacctgggctctatctctgggctccagagcctgaattttttgtttgcttgtttgagactcggtagcccaggctggagcacagtggcgcagtcatggctcactgcagcctcaacctcctggactcaagcgatcctcccacctcggcctcctgagtggctgagtgatagggtctggatttgtgtcccgttcaaatctcatgtcaaattgtaatccccaatgctggaataggggcccagtgggaggtgactggatcatggggctaggtttccccttgctgttctcctgataaggagtgagttcttatgagatctcgctgtttgtttgtttatttattttgagacagtttcactcttgttacccaggtacaatggcgcaatctcagctcgttgcaacctccgcctcccgggttcaagcgattctcctgcctcagcctctcaagtagttgggattgcaggcatgcgccaccacgcctggctaattttgtatttttagtagagacggggtttctccatgttggtcagggtggtcaccaactcccaatctcaggtgatctgcccccctcggcctcccaaagtgctgggattacaggcgtgagccaccgtacccagccaagctctcgttgtttaaacgtgtgtagcacctcccccagtctctctcttgctcctgctctggccgtgtaaaacccgcctgcttccctttcaccccctgccatgaatgtcagtttcctgaggcctccccagctatggttcctgtacagcctgtggaactgtgagccaattaaacctcttttatttataaattacccagtgtcaggtatttctttatagcagtatgagaacgaactaatacactgggactccaggtgtgcgccaccacgcctggctaagttttttaatttttaaaaattatatttaaatttttaagagcctgggctatgttgcccaggctggtcttgaactcttttttgtcttttgaggtggagtctcactctgtcacccaggctagagtgcagaggcaagatctcggctcactgcaacctccgtctcctgggttcaagtgagtctcctggctcagcctcctgagtagctgggactacaggtgcacaccaccatgcctggctaatttttgtatttttagtagagacaaggtttcatcatgttggccaggctggtctcgaactcctgacctcaggtgatctgcccacctcagcctcctaaagtgctggggttacaggcataagccactgggcccggtctggtcttaaactgttgagctcaagtgatcctcccacctcggcctcccaaagtgccaggattacagatgcgagccactgtgcctggcccagagcctggttttgagggtgtagcaatggccttctggaagatgcaatagctaagtttacggatgtaggagcgagagtcagcatgggcaaaggcagggagggcagagcatccgttcatcccagaaatatttactgagcacccactatgtgccaggcactgttctaggtactggggtcactactgtccaggagacgcgcagacatccccaacctcataaagcttctgctctagtaggaagacgcatggcaaacagaggaacctgaaagttgtttaatgaggagttggggccaggtgtgatggggcacacctgtaatcccagcactttaggaggctaaggtgggaggatcacttgtgaccaggtgtttgaggttgcagtgagctgtgatcacaccactgcactccaacctgagcaagagagcgagaccccatctctaaaaataaataaataatacaaataaataaaagaggagatgaagacacacacataggaaaagaccacgtgaagatacagtaagaaggtggccacctgcaagccaatgagagaggcctcaaaagaaactaatgctttgatttcagacttcaagcctctaggattgtgagaaattaaatttctgttgtttaagccacccagcccaaagcacttcatgacagcagacctagtaaacaaacacacatttctgcagctttggcgctctctctgtggcctgggggtagcaatagctcctctcagctgcagacccaaggattttctgagacagagtcttgctctgtcacccaggctggagtgcagtgacgcaatgtaggctcactgcagcctctgcctcccaggttcaagcaattctcctgcctcagcctcccaagcagctgaatttacaggcacctactaccacacccggcaaatttttgtatttttagtagagacggggttttgccatgttggccagctggcctcaaactcctgacctcaagtgatctgcctgcctcggcctcccaaagtgctgggattacaggcatgagccactgtgcccggcaaccccagggattttcaacatccctttgctccttctattaaccttgcccacatctctgaaaacagtcatttcattccagagaattgtcctctggaatcccttttgaaggaactatgctttttcctgggaccctgccctatacagtgatgccctatacagtagcctgaccgggcagggctactgagagatggactctaagatggactcaagggtaggaaacttccaagggcgtgcatgtgagtttgctcaggctgccttgactgagtatcccaggctgggcagcataagcaacaaaaatgcattgtctcacagttctggaggccggaagtcagaagtcgaggtgtcagcagggttggttccttcaagcctcactacagcctcaacctcttggactcaagggatcctctcagctcagcctcccgagtagctgggactacatgtgcatgccaccatgtcccactaatttttaatttttttttttttacagttggggggtcttgctgtgtggcctaggctggtcttgaactcctgctgtcaagtgatcctcccacctcagcctcccaaagtgctgggacgacaggtgtgagctactgcacccggacctaatctccttttcttatacagacatgagtcatgttggattagggcccattccaaaggcctcattttaatttaatcacctcttaaaaaaaccccacctccaaatacagtcacattcattgtgaggtactgggtgttaagaattaaacatatgggctgggcgtggtggctcacgcctataatcccaacaccgtgggaggaggccgaggcgggtggatggcttgagcccaggcaattacttgagactagcctgggcaacacggcaaaacctcatctctacaaaaaatacaaaaattagccaggtgtggtggctcgcaccactaatctcagctactcgggaggctgaggagggaggatcacctcagcccagggaggtcaaggctgcagtgagctgtgataacgccactgcactccagcctgggcaacagagtgagaccctgtctcaaaaaagaaaaaaaaaaggccaggcgcggtggctcatgcctgtaatcccagctcttagggaggccgaggtgggtggatcgtgaggtcaggagatcgagaccatcctggctaacacagtgaaaccccgtctctactaaaaatacaaaaaattagccaggcaaggtggcgggcgcctgtagtcccagctactcgggaggctgaggcaggagaatggcgtgaacccgggagctgcagcttgcagtgagccaagaccgcaccactgcactccagcctgggcgacagagtgagactccgtctcaaaaaaaagaattaaatacatgaatttttggggggtggaaacacacaattcagcccatagctgtgtgtgagtggggtaggaatgtggtcaggggctgggcggtggctcacactcgtaatcccagcactttgggaggccgaggtgggtggatcacttggcctcaggagtttgagaccagcctgggcaacgtagtgagacgctgtgtctacaaaaaattaaaaaataagctgggcatggtggtgcatgcctatagcctcagcacctcaggaggctgaggtgggaggattgtttgagctcaggagtgagctatgattgtgccactgcattccagcctggggaacagagcaagaccctatctattaaaaaaaataaaaaaaaaagccaggcgcagtggctcacacctgtaatccccccactttgggaggccaaggtgggtggattacatgaggttaggaggtcgagaccagcctggccagcatggtgaaaccccatctctactaaaaaaaaaaaaatacaaaaaaaattagccaggagtggtgacaagtgcctgtagtcccagctacttgggaggctgaggcaggagaatcacttgaatccgggggtggaggttacagtgagccgagatcgcaccactgaactccagcctgggtgacaagagcgagactccatctcaaaaaaaaaaaaaggatgtggccaaggagatcatgaaaggtgaactggccagggcaaaacacaggcaaaaatccaacaaattccaggtaagcatatccaggctgactcagcccatccctctgggtaagcccaagactttcagatgaatcaatctcagaggcagaaaacagctccagcctagaggcaggcacgtcctctgcttggaggggagggggtagtggcggccacctgggtcaccggagacctttgttagcgagaatgggctgcttaaagggaaatcaatcctggctaagcactgagcagctgctcccagtcaaagctgccggagagaggcccgtggccccccagcttctccagggctgggagtggagccagaggaggctgaagactgctctgccaggtggcaggactcagagggccttcaatcagcctgcattgtacccgccagcgcctgtatccatccccggctgagcacgcacttcagtatcacctctagccatggcatgcaccaaagagcagcatccagcaagtgataacatcttcaccagtttagtcaagcattgcccgtgtgccaggcattttgcatgcacgatgtgtgcacgggggacctcatcgcaccacctcctagccatgacctcagacaagtgacttaagcctcatggtgcgccagtttccccatctgtaaaacgaggtgaacagcagcatccccctcttagggcagtcacggaggttgaacgaatgcctgcgcacacagagcttaaaatcacagtagtcttagctgggcatggtgactcacacctataatcccagcactttgggaggccggggtgaaaggatggcttgagcccaggagttcaagaccagcctgggtaacatagtgagacctccgtctctaacaaaaatacatagattagccaggcatggtggtgcgcacctgtagtcccagctacttgggaggctgaaagaggaggatcacctgagcccagggaggttgaggctgcaatgagctgtgatcatgccactgcactccagcctgggtgacagagtgagaccctgtctcaaaaattaaaaaaaaaaaaaaaaaaagcccaggcacagtggctcaggactgtaatcccagcactttgggaggctgaggcaggcggatcacaaggtcaggagttcgaaaccagcctggccaacatggtgaaatcccatctctaccaaaaatatataaaattagccgggtgtggtggcaggtgcctgtagtcccagctactcgggaggctgatgcaggagaatcgcttgaacctgggaggtggaggttgcactgagccgagattgtgccagtgcactccagccccaggtctatgggactgtagagatgctggtgtttctacagctaggactcgccagttctaggcattcttcagagctcacagcaaacaccaccacctccaggaagccttctccatcatctaagataggtctgtgttccttcctgtgcacatctccacagctccctgccccttccctccacaaagttcttatattttattcttttccttgcatggtgggtgtctgcatgccccattaggatgtgagctccaaaagggcagggctgagtctgtcttcttccatgctatggtcccaacaccagcagatgctggagacaatggacaggcatcaagatatgaatgaatgaatgaatgcttcctgtacactccaagttttccatgtgaccccttcctccccgactccccaacaccctctgtctgctctcttcctccttcctctcccatcacagggtggatacaggggctctgggttttgaagcggtcatggagtcaaaggtagttgagtgtagctgtgaagcacatggaccctggaggccgacaacttgaacttcaaaacccggcttctctttctagctgtgtgaccatgggaaagtgacttaacctctctgtgcctcactttccccacctgcaaaatgggagtgatagtagtgccttactgttgagtgagtgattctgacccattcccagactgcaattcccagactgggaggcagagggctgagtctccggcagttaatgaatccggaaaaaatctcagctgtgtcagaggagccccagtgccaagttggcctggttttcatcccaagagagctgagaacatggtctggtgtcagacatccacgctgtgattggcacaaatgcctggtgctcctatgacccccctcgttagggctgggggagtgtgggagatgctcctggggctctgcccagagctgctgactgcctagatgtacccaccctgcagctgctgagcacggcggctcattgctagcagctgtgatcttctctggacctgcccatggcttttgggagccaccacaccttggagatgcttgggaggtgtcacctactcccaggggcagctaatgactgatgcaggggtaaaaagcccactcctcttctcatggtgagataactccacagtgtccccccacccttgtggagcaagccaaaccgggactttacctaggatctcatctttgctcaatctattctcttccaggtcctgctcccctcacccctgccctgactttcaattatgtgctccacagtcaggcacggtggctcatgcctgtaatcccagtactttgggaggccgaggcaggaggatcattgagcccaggagtttaagaccaggctaggcaacacagcaagaccctgtctctacaaaagattaaaaaattaaccaggtgtggtggcgcacacctgtagtcccagctacatgggaggctgaggtgggaggattgctagagcccagaaggttgaggctgcagtgagccatgattgcacccctgcactccagcctgggcaacggagcaagaccctgtctcaaaaaagaaaaaaaaaaagtgctggaaacttacgtctctagttctgcttctcaggaacccaacctaagatgggggaaatgatgaacattcaacctaagagggtttttgtttttgtttttgttttttgagacagagtttcgctcttgttgcccaggctggagtacaatggagtgatcttggctcactgcaacctctgccttccaggttcaagtgattctcctgccccatcctcccgagtagctgggattacaggcacacaccaccatgcccagctaattttttgtatttttagtagaaatggggtttcaccatgttggccaggctggtctcgaactcctgacctcaggtgatctgcccaccttggcctcccaacatgttggtattaccgcactgggccctaagagggtatttatgtcagtgtcccttcaggttcacattcacaccctggcaccgagttctgtcatttccacctaaataggcaatccatcctgcacaaccccgaaagcagccctcacttcgaaatgcatcctcgattctgcccagtctgcctcgtccacatgtgcagcccctgtcatgctccaggaccatccctgatgcatttttccgcaccttacattcatctcgtttctttttctttctttcttttttttaaatctcagctcactgcaacctctgcctcctgggtccaagcgactctcctgcctcagcctcccaagtagctgggattacaggcatgtgccaccacgcctggctaattttgtatttttagtggagacaaggtttcaccatgttggccaggctggtctcaaactcctgacctcaggtgatctgcctgcctcggcctcccagtgttgggattacaggtgtgagccaccgtgcctggcctcatattatttcttgtctgtcgctctcatatgtacactccccaaagggcaggaatttttatcactttgttcattgctgtgtcctcaaaacagaacagtgcctggcacgcagcaggtgttcaataaacatctctggcattcaagaataaatcgtttaagtacattcacttgcaaacagaatccacccaatttttctttttctttcattttttttttagatggagtctcgctcttgttgcccaggctggagtgcagtggtgtgatcttggcttacagcaacctccacctcccgggttaaagcgattctcctgcctcagcctcccgagtagctgggattacaggcacacaccaccacccccagctaatttttgtatttttagtagagatgaggtttctccatgttggccaggctggtctcaaactcctaacctcaagtgatccacttgcctcggcctcccaaagtgttgggattacaggcatgaaccaccgcaccgcccaccctctctttctcttataccaatgcatcagccttacctttagaatctacccattgctctaccctcttgatggccatctccatggtcaagcccctggcattgctcacctgaaccagcagagttcatcccttccatggtctcccagttccccctacttgcccccacagtctgcttcccccacagcagccagagagcacctgtgaacacatgaatcacactgagtctctcccgtgctgagaaccctccatggctcccatctcccctgagttaaaagcccaaatcctcagccaagcgtgattacacctgtaatcccagtattttgaggccagaggatcacttgagcccaggagtttgagaccagcctaggcaacatagtgagaccccatctctacaaaaaattaaaaaataagccggaagtggtggcatgtgtctgtagtcccttctacacaggaggctgaagtgggaggatcgcttgagcctgggaggtcgaggctgtggtgagccatgatctctccttgtctcaaagtagagttctccccaaggcacgtaactccttcacaatctgtcccatcacctccctgccctcacttccttccactctccctctcactcactctgttccagccacactgttcctgcaaaaccccaaacatatttcttctatatcacctctttgcactggctatcccctctgcctgaaatgtccttccacctccttcagacccttactgaaatgtcattgtctcaaaagaccctccctgctggcctggcgcagtggctcatgtctgtaatcccagcactttgggaggctgaggtgggtggatcatttgaggtcgggagttcgagaccagcctggctaacatggtgaaacccccgtctctactaaaaatacaaaaattagccgggtgtggtggtgcgtgcctgtaatcccagctactcgggaggctgaggcaggagaatcgcttgagcctggggggcggaggttgcggtgagctgagatcatgcgactacactccagtctgggcgacagtgagaccttacctcaaaaaaaaaaaacaaaaaacaaaccttccctgatctcccctggccagaactacaagtgccccagcaccccccatccacttccctactccatctgcttccgccacatcatttatgcattaattttgcaaattatctttcttcccctccagaacgtcaggcaggagtttttacctgtttttgttcactgctgtgttgccagcacttaaaatagatcatcttgcacacaacaggcacctggtatccatttgttatttttaaaattctgccgggcacggtggctcacgcctgtaatcccagcactttgggaggccgaggcgggcggatcacaaggtcaggagatcgagaccatcctggctaacacggtgaaaccccgtctctactaaaaatgtaaaaaattagccgggcatggtggcgggtgcctgtagtcccagctacttgggaggctgaggcaggagaatggcttgaagccgggaggcagaggttgcagtgagccaagattgcgccactgcactctagcctgggtgacagagcgagactccgtctcaaaaaaaaaaaaacaattctgcacaacaaccatatgaggtaggaactctcggtgtgccccttatgtgggtgaggaaactgaggcctggagaggggagggggtgtgcttgggtcatgggttagggagtgagctgtggccatgtgtctctccatggtgtgtatgtgtgcaactgtgtgttttttgtattttgttttttgtttttgagataggctcttgctctgttgcccaggctggagtgcagtggcgcgatcacagcacacacagtgtcaatctcccaggctcaagcaatcctcccacctcagcctcccaagtagctgggactacaggtgcatgccaccatgcctagtaaatgtttgtcttcttttgtagagatagggtctcactatgttgcccaggctggtctcaaactcctgggctcaagcaatcctcctgcctcagcctctcaaagtattgggattacagacataagccaccacacccagcccaactgtgtgttttgtgcagatgcagtgtgagtggctgcatcagcccgaatgtggacagaggaggatgcattcaggctcactttgcatcggggtgtctgtgagtggaagggaggcagtgggccagacccaggcaggtgtgaacacgtgtctgtgtgttcggctgggtatgaatgcgtgtgtgtgcgccaatgcactggcggatgggaaattgtgcatccacagtgaagctgtgtgtatgtgtgtgaaggggaggctctgtgagctttggatggggctggagctgcagttgaagcaatgttgtgggtgagggaagaaccccaccagccacaggcctgttatttatagacgaatcctggttcataaattccaatttttttttttttatatctgcctcactgccaggcccctataaatattcatgagtttcctgccttggaatatttgagtagtcagaaggaggagccgggaggagaggggacaacgaagggtccccagtggcgctgggagctcacacgggtcgggaggacaggggtctctctggttttgccttctcttccctctgggctcccctcttccaagctgcagctggcaagacggggaaggcgctgggctggtggagacatctaccagcacctattattcttcttccccagtgtctgtggaaaaataccacccactccgggggcagagaaggtgtctgcactgttttctcagctccagctctagctgcagctcagaaactcattacccctgggacccccagctcaacagagacagggagatccccctgatgtatctgaagctaagggaagactctggggggagggggcgggcactgtggcctcctgccctgcctcaaggaaggaaacaggtcatgagaatgggtgcccgtgagaaggaataaagtgcgtgcatgtggacgtgtctacaggagtgagtaactgttggaacatgtaagagactgcagtagtcaacagaactgttgacacattttctagttcttttctcttaggcacatgatggggctgtaggacttccccagtgtggccacgtgacttcctttagccaatgccttttaaacggcagtgacttccaggtgaatactttaagagccggtgtggaccaggtgtggtggctcacacctgtaatcccagcactttgggaggccaaggcaggagaactgcttgaggccaggagtttgagaacagcctgggcaacatagcaagacccctattctacaaaatattttaaaaatttatcgggcatggaggtgcacacttatattcccagctactcaggaggctgaggcaggaggattgtttaagcccaggagttggaggctgcagtgagctgtgatcacaccactgcactccagcctgggcacagagcaaaaccctgtctctgaaacaacgaagaaaaaaagaggcaagccagtgtgcagtgccacagtcttccctcagcaaccgcagaagggcatgttgggctgggtgcagtggctcacacttgtaatcccagcactttggtaggctgaggcacgcagatcacctgaggtcaggagttcaagaccagcctggtcaacatggtgaaacccagtctctactaaaaatacaaaaattagccaggcctggtggtgggtgcctgtaatcccagctacttaggaggctgaggcaggagaatcacttgaacctggaggcagaggttgcagtgagccgagatcgtgccactgcactacagcctgggcaacagagcgagactccatctcggaaaaaaaaaaaaaaaaagtgcatgctggggccaggcacagtggctcacatctgtaatcccagcactttgggaggccgaggtaggtgaatcacttgaggtcaggagttcgagaccagcctggccaacatggtgaaatcctgtctctactaaaaatataaaaattagccaggtgtgctggcacgtgcctgtagtcccagctacttgggaggctgaggcaggagaattgcttgaaccgggaggcagaggtgagctgagatggcaccactgcactccagcctggcaacagagcaagactccatctcaaaaaaaaaaaaaaaagtgcatgttggtatgaagcctccatcactggggtccctgagtggccagactaggcagagaccctgccaaccctcatgtatcatgagcaaaagctcatttggttgtactaaccctctgagacttgggggctgttttgttatacagcaaaacctagcctatgctgactggcacagagccagtgagtgtgtgagactgaggtgtggcacgtctgtgtctacatgatcaagaacacacatgagcaggtagctatatataggtttatgtgtgtgagcatcagcaagtgtataaaactatgcatatgaatgtataaaacaggatggtgtcagatgatagataagtgagaaaactccagggacactgttctccgagaacaccatgaccctggagtcgggcactattgcagatgtgaaactggcatagtgaggagggctatgtctgagtgtgccagttggctgtgtttgtaagactgtgatgtggtctgtacgtgtgtgtgccagggtttggggtgtcaatgtgcatgtctgtgccacgtgttgctgtgtatctgaggcacgtgcatgggttggtgtgactgtgtgtgtgcatgtgtgtatctgctgctgtgtggatatgtgataccctgggtgtgacagcctatatggagtgggggcatcactcaagtctgtatcagagtacatacagccaacaccacagggagggacagccaccctgggcatccctagtgctgttggctcatgggcctgacctggctcaaccttggatcctaggatgacctggcattgggaaataaaattctggctgtgtgcggtgcctcacgcctgtaatcccagcactttgggaggccaaggtgggtggatcacttgaggccaggagttcgagaccagcctggccaacatggcaaaaccctgtctctactaaaaatacgaaaattagctaggcttggtggcgggtgcctgtagttccagctactcaggaggctgaggtgggagaatcacttgagcccaggaggcagatgacgccactgcactccagcctgggtgacagagcaagactctgtgtcaaatcaaatcaaataaaaataaaattctcatcccctcatgagtcctgggacattccaagtcatctgcaatggccattcatcccagaggcactcgacagtttgggtgacgcggctcaacaagtagggagagcaaacctgttctcccacaacttctctaagataagcccattttctggttctctcctcacaaggttctggtctgatctgtctcaggatgtgggttcagccctggtccatctcaggattcaagttaaactctggtctatctcagtacttgggtttggccttgtctatctcaagtccacagcgtagccctgatctacccaggactcggatttggtcctggccctcttcatctcttagaaccaggtttctctttggtctctcccagttaagcctttgtctgtccaaggcttgggcttgactctagtctgtcatagagtcaaaccacaaggcatcttttattttttttctttttctttttttttttgagacagagtctcgctctgttgcccaggctggagtgcaatggcacaatttcagctcactgcagcctccacctcccaggttcaagtgattctcccgcctcagcctcccaagtagctgggattacaggcgcctaccaccatgcccagctaatttttgtatttttagtagagactgggtttcaccatgttagccagggtggtctcgaactcccaacctcaggtgatccacccgcctccacctcccaaagtgctgggattacaggcgtgagccaccgcacccggccaatcatggagcatcttaacaccttggggatgtatctgtgttctgttccaggacttgagtgaaccccccgtcttggaacctgagctgagcctggtctatctcagtacctgggtacaccctgccctagtagaacgttcacaatcaggtgaggatttcatggcagaaatttccccttcctgggcaccttctcacgtgtggagcacttctcttaaagtgtttggggcctcttgggtgaacgtctactgcaaatgattgctgtgtctcaggattaatgagggtaaggggatttcatttctccaacgccatcatgtaaaattcattaaagcagagttcgcaggtctatttcaaggattattaccagggtttcttgatgagctattacacacagcataaatcttcaagaggtttcaagacgttacaagaaccatcctgagtctcacctcatagatactagagttgaacatccctctatctgagctctccccagcctcagacaccaaacctcaggtcaggagttcaggagagagcattcaagagggttttcttggtcgggcatggtggctcactcctgtaatcccagcaactttgggaggccaaggcggatggatcacttgaggccaggagttcgagaccagcctggccaacatggtgaaaccccatatctactaaaaatacaaaaattagccggccgtggtggcgcacgcctgtaatcccagctactcaggaggctgaggcaggagaaccacttgaacccgggaaggggaggttgcagtgagcagagatcatggtaacatgtgctaaacaggaagggtcaaaacctgctgtcacctgagcccaggtaagtcacggctgcagtgaaaccgggatggtgtcactgcactccagcctgggcaacagagtgagactctctctcaataataataataataataataataataataataataaataaataaaataaagccaggtgcagtggctcacgcctgtaatcccagcactttgggaggctgaggcgggcagatcacctgaagtcaggagttcgagaccaccctgaccaacacggagaaaccccgtctctactaaaaatacaaaattagccaggtgtggtggtgcctgcttgtaatcccagctactcgggaggctgagccacgagaatggcttgaacccaggaggcagaggttgcagtgagccgagattgcaccattgcactccagcctgggcaacaagagcaaaactccgtctcaaaagaataaaaaattaaaaaaatacataaataaaataacttcccactcctcggttgagaaccacagctctagacttagccttgcattttctctttatctttctctaaggagtctgacccttaccaaagcgtccatcaacacctgcctgtatatatgtcctcagagctccaatgcatatattcatcatctgactccttgaccgctccccctgccccagatatctctaaggcatctcaagcccaacatgctcaaactgaagtgcacagccttccctccctaacctagttcttatccaacattccttatgtcaccatctccatcctccccacccccgggccagtgggtcagacacccgggcattatcctcaccctcattttactccctcaccaaatcctactgatgttaactcctagatagctttagaattcatgcatcattcttcatctctatcaccatgcaatggtccaagccactttcacaattcagcaagtctaggctgtgtgcagtggcttatgcctgttatcccagcactttgggaggccgaggtgggaggactgcttgatcctaggagtttgagaccagcctgggcaacatactaggaccctaactgtaccaaaaaaaaaatttttttttaattagcggggtgtggtggcacacgcctgtagtcccagctactcgggaagctgaggtgggggatcacttgagcctgagaagtcaaggcttcagtgagccgtgatcacaccactacactccagcctgggtgacagagtgagaccctgtctcaaataaataaataaataaataaatgtaaaatatgacaaaacatttaaataaaaataaagtctattcggtctacctcaatctaccttttttcttgctagtaactctacacatgggagcttctgggaaactttatttatttttattatttatttatatttttagaccgagtctcgctctgtcgtccaggctggagtgcagtggtgccatctcagctcactgcaacctccacctccagggttcaagtgattctcctgccccagcctactgagtagctgggattacaggcccacgccaccacacctggctaatttttgtatttttagtagagacagggtttcaccatgttggccaggctggtctcaaactcctgacctcaagtgattcacccgccttggcctctgaaagctgggaaactttacaacgcacgtgtgatcatattatcctcccggccaaaaccatattggtggattccttttattcttaggatagagataaaactccttaatgtcgccacaagagcctgtggctctgcactttacttacttctctgctttcatctggtctcctcgttcccaggccttctttactttattttaatttttttttttttttttttttttgagacggagtcttgctctgttgcccaggctggatggagtgcagtggcgcgatcttggctcactgcaagctccgcgtcccgggttcatgccattctcctgcctcagcctcccgagtagctgggactacaggcgcccgccaccacgcccgactaatttttgtatttttagtagagacagggtttcactgtgttagccaggatggtctcaatctcctcaccttgtgatccgcccgcctcagcctcccaaagtgctgggattacaggcgtgagccacagcgcccagcctattttaattttttttagagacagagtcttgctctgttacccaggctggagtgcagtggcacaagtgtagcttactgcagcctggaactcctggctcaagccatcctcccaccccggcctccgaaagtgctgggattataggtgtgagccaccacctcacctggccttgcaaggccttctttagtccatcatattttccatccttcctcttaccccagggcctttgcataagcaattccctctgcgcagagcatcctttcctctctgcatcagatctcagctcttgcttcctctgacttccaaattacatcaaatctccttattagaagctactagagcaccaagaatctttccctcaaagctgttaatcacagctgccaattatatttatttgcaactacataatcatcacctacctccctgttttgcagaaagcgccacacatccatgtctgtttggttgaatataatttctcccttaaaagcatataagaagtcctcaaaaacacttgttgagggtgcagtggctcacacctataatcctagcagtttgaaaggctgagacgggtggatcgcttgagcccaggagttcaagaccagcccgggcaacatagcgagaccctgtctctacaaaaaattagaggatgtgggccagatgtggtggctcacacctgtaatcccagcactttgggaggccaaggtgggcagatcacctgaggtcaggagttcaagaccagcctggccaaaatggtgaaaccccatctctactaaaaatacaaaaattaggcaggcatggtggtgcatgcctgtaatcccagctacttgggaggctgaggcaggagaatcacttgaacccagaggtggaggttgcagtgagccaagatcccaccactacactctagcctgggcaacagagtgagacttcgtctcaaaaaaaaaaaaaaaaaaaaattagaaggcatggtggtgtgagcctgtagtcccagctactcaggaggctgaggtgggaggattgcctgagcctagggaggttgaggctgccgtgagctgggatcgcgccactgcactccagcctggacgacagaatgagactctgtctcaaaaataaaataaaataaaaacaaaatacttgttgaataaataaatacacgaatggataaatggctccgctgttttcaggatctagtctgagtgacttggcctggcatttgaggctctccatgacctcaggggctgagctccctcccggtctcagtaaaggtcagagcaaaaacccaagggcatgagatgccaggtggggaataataattcagcagaagcaagaagtcagaagcacagtgaccaagacaattcaggctcctccacagagtcacaaaaatcttgggggacacactggctttcttcccatggagcatggaagggggttcggatcattgttacttcctggctattaacatgcagagtgacctgtctgatgtctgttctgccttgattctccttgtcttttattttatttttacttttagacagggtctcgctctgtcacccaggctggagcacagtggcgtgatcatagctcactgcaacctcgacctcctgggctcaagcaatcctcccacacctcagccttccaagtagctgggactatagatgcatgctactgtgcccagctaatttttttttttttttttgagacagacacgggatttcaccatgttggtcagggtggtctcgaactcctgacctcaggtgatacacccacctcggcctcccaaagtgctgggattacaggcatgagccatagcgcctggccccagctaatttttttaaaaaaattttttgtgctgggagtgttggctcatgcctgtaatctcagtactttgggaggccaaggcaggcagatcacctgaggtcaggagttcgagaccagcctggccaacatgatgaaacctcttctctactaaaaatgcaaatattagctgggtgtggtggcgggcgcctgtaatcccagctacttaggaggctgaggcaggagaattgcttgaacccgggaggtggaggttgcagtgaacagagattgtgccattgcactccagcctgagcaacaatgagactccgtctcaaaaaaaaaaaaaatttttttgtgtgtggagactgggtcttgctatgttgcccagggtggtctcaaattcctgggctcatgcgatcctcctgcctcaacctcccaaagttctggaattacaggcatgagccactgtgcttggccccctccttatctttaagaaattctccctgggccttataagtctctccagccaccacgccatttctgtgttcctctcttcccccaattcatcacatctgatccatcagcaagtgctgacggctctgcttctgagatgtaccagtctgcccactgctcaccattccagctaccactgttctggttcagataacaccgggcttgctcggtccttctgattctactctcacttccgggaatccattacccaacccagcagctagagagatctttaaataatgtgaatcagatcaagtccctccaccccacggcaaatcgtccagcagcttctcactgcgtttggaataaaagccaacaactttgggaggccgaggtaggtggatcacttgaggtcaggagttcgagaccagcccagccaacatggcaaaaccccatctctactaaaaatacaaaaattagacaggcgtggtggcagccacctgtaatcccagctacttgggaggctgaggcaggagaatcacttgaacccgggaggtggaggctgcagcgagccaagtttgcaccactgcactccagcctgggcaacagaatgagattccatctcaattaaaaaaaaaaaaagaataaaagccaacagttcactgtggccagaagcctcgaatgcagtgttccctgccaacctctacaactccattctctctccctctccagccttctctttccagagtgcactatgcttgtttcaacctcagggcctctgcacatgcagctccctctctcatgatgcccgtctccctggctccttctcaatcagctccccaaagagcttaccccagtgacccaacataatggggctcacccactcatactctctcccatctacttgttttgttcttctcttttcttttttgagacagagtcttgctctgtcacccagactggagtacagtggtgtaaccatggctcactgcagcctcgacctctgggccccagtgatcctcccatttcagcctcccaagtagctgggactacaggtgcacgccaccatgcctggccaatttctgtatttttttttagagatagggtttcactatgttgcccagtctggtcttgaactcctgggaccaagcaatcctcccacctcagcctcccaaagtgctgggattacatatatatgtgagccaccacacccgccccacccccgccggatactgtttagccctctgtactgcgcttatggccagatgataatttcttgtttatttgtttgttattgatctcctcccaccacaatgtcagttccacaagagcaagtgccttgtctcacgtgtccccctggcacatagtaggtgcataataaatatctgttgaccgaattgacaaatgagcgaatcatggctttctaggtccctggagccccagctattgggttttgtgagatcccctgcattccttacataaagctcctacttccctgggccggttaggaggctttcaattccaaacagactctctgactcccacccaccccatggccaacaggaggcaaatgaaaatgaagagaggtgtcagggaagagctaactgccgagagaggaaacctgggaaggggaggagagggatgacttgaaaagatggaccttctccagctggagcagggaaggagagaaactgacggagctgcatcagtggatgatggaggcacaccacggtggacacaagcacacgcaggaggtgtgagaaaaggctggaaaatgagacagaaaagggccgggatctctctgcaccacactggtggagaatattcatgatagtaatcatgattcgactcaataaaaaccacggtctctaccacgcactgcacccttccttgtgccgggcacctttctttgcattgccccccatacttagctctgatgggggaaaggtgtgaaacgtgatgggggtggggagagaaatcccagctaaaaaaggctggtgaagcgcttcgggtggctgaggcaggagggtcgcttgaacctaggagtttgagacccgctcggacaacattgtaaaaccctgtctctacaaaaaaattaaagattagctgagcatggtgatgcatgcctgtagtcccaactactcagcaggctgagttgggaggatgacttgagcccaggaggttgaggctgcagtgagctatgattgcagcactgcactccagcctgagtgacagagcaagaccttgtttcaagagaggagaggggagggaaggggagggaaagggaaagggaaggggagggaaggggaaggaaggaaggaaggaaggaaggaaggaaggaaggaaggaagggagggaggggggagggagggaaggaggaagggagggaaggaagcggggagggagggaagggagggagggagggaagggagggaaagaaagagagtgaggaaggaaggaaggaaaaaggaaggaaggaaagaaagaaaaaggaaggaaagaaagaaggaaagaaaaagaaagaaaggaaggaaggaaaagaaagaaggaaagaaggaaagaggacggaaagaaagaaaggagaaaaaaaaaaaaggaaggaaagaagaaagaaagggagggagggagggaaggaaggaagctggatacagtggcctgtgcctgtaattccaactacttgggaggctgaggaattagacttgcttgagcctggaaggcagaggttgcagtgagctgagatcgcgtcactgcactccagcctgggcgacagagtgagactctgtctcaaaaacaaacaaacaaacaaacaaacaaacaaaaaacataatgaaagaaaggttggtgtggtgagcagggctgtgctcagggctctgtattcctggctcactatccaggatggccgagaactcagacacccacctgactctgaacttccctctgtactcctttgaaaagagcctgagggcacttttgaggccacctttgttggctttgagatctcgctttgccaggagttcagagaatttctggagatttggttatttgtgttccaaaagagcagcatgtaggcattggagtgcacagggattctgcaaccagatgtggacgcctgtgttgtttatccacaggcacctgtgaattcccacgtttagggcacatgtggagtatctggacatgcctgtaactagctatgcacatatgtgcacatcagtggaaatccagggaaacgccattgtgcattagaggatatgtatgtctgtgtgctgttgccaatggcaataaacattccttttgttcacacatgttcacaaacattctatttccatagattctgtgtacaattcgtgagcccacaagtcaacctgcgtaatcactttatatactgactatatatatatatatatttcgagatggagtctcgctttgtcacccaggctggagtgcagtggcgtgatctcggctcactgcaagctctgcctcctaggttcactccactctcctgcctcagcctcccgagtagctgggactacaggcacccgccaccaagcctggctaattttttgtatttttagtagaggcggggtttcaccgtgttaaccaggagggtctcgatctcctgacctcgtgattcgcccacctcagcctcccaaaatgctgggattacaggcgtgagccactgcgcccagccgactctatattgatattgaggacactggatatatctgtgtttacttgccttcatcttttttttttttttttttgagatggagtctcactcagtcgcccaggctggagtgcaatggcgtgatctcggctcactgcaacctctgccttctgggttcaagcgattctcctgcctcagcttcccgagtagctaggattacaggaacccaccactgtgcctggctaatttttatattttgtatttagtagagatgggttttcaccatgttggccaggctggtcttgaactccactcaagtgatccacctgccttggcctcccaaagtgctgggattacaggtgagagcccaggagttcaagaccaggtgggaggatcacccagccttttctggtttctttttagagacaaggtctcactgtgtcacctaggctggagtgctggtgcgatcatagctcactggagcctcgacttcctgagtagctgggattaaaggcatgcaccaccatgcctggctaattttttatactttttgctgtagagacaggatctccctatgttgcccagactggtcttgaactcctgagctcaagtgatcctcctgccttggcctcccaagtagctgggaccacgggcgggtaccaccacgcccagctaatttttgtactttttgtacagacagcctcgatttcctgaatagctgggattacaggcatgcaccaccatgcctggctgatttttacatattttgttgtagagacaggatctcacaatgttgcccaggttggtcttgaactcctgggttcaagtgatcctcccactttggcctctcaaagcgctgagataataggtataagccactgcacctggccattgcttttatcctggataattctgcagccatggacagaagtgcacatacccatactcacaaatagctctgccacatgtgccagcatgagagcccatcacacaggtgaacgcctccctgtgaacacccatggccctctgtgtgctctcctgaacagccaggtacccacatgtatgctcaccaggagccaaaaacatgttattcactaacatgttaatcacacagaagccacacacttgcatccattcaagtaacaactgtgcccttccatgattaactctccacacccatttgttcagccgcctgtatccacaaacattcctacgctcctttcaggaggaactggcatctgtatatatctgtcagctgccatcttaggtctccccaacgaactcattagcattgcggtgaaacctgaaatattcctgcagaacttctgctctactaataagcctgatgtcctgctgaggtcacatggcacttacgagggctaatggagccagccttggccagcaaggtaggaaaccctggactcctggaatagccagagaatgtctggctatttactcccaagaataaacaaatttcctttccttctcactgcaccaagtgccccagccagcatctatctgcagaaccaaagtcatatttaagatacatttttggcctcaatactatcctggcatcacactaaaggctacatctacttgttattctactgaaggttgcattactctgatgggcactacactgggagctgcatcaccagatttgtcattatactgaaggccacatcactatcatgggcactacactgagggctgcatcaccagacttgtcattatactgaaggctgcattacctggttgggcattacactgagggttgcatcatcagacctgtctgaaccaccctgttagtcttgcccttaaggcctccaatcccaggctgagtattgtttgtgtgtgtgtgtgtgtgtgtgtgtgtgtgtgtgtgtgtgtgtgtgtgtgtgttttgagatggagtctcactctgtcgcccaggctggagtgcaggggcaggatctcggctctatgcaacctccgcctcccaggttcaagcgattctcctgcctcagcctcccacgtagctgggattataggcatgtaccaccacgcccagctaatttttgtatttttagtagagacagggtttcaccatgttggccaggctagtctcgaacctctgacctcaggtgatccacccacgtctgcctcccaaagtgttgggattataggcgtaagccaccatgcccagcccagtctgagtattatactgagggcttcataactagaaagctaaacttaacaggcaacactttccctcagcactggtagctcccctgtgtgtagtgtgaaggggcaagcagaagtggggttgagaagtgactctgaggggcctggtaggactagagagatgaggaaaactggggactctgaagccacacactgggggtgggaagccagaggacagaaaagcaactattatatcaagagttggaattctggccaggcatggtggctcatgcctgtaatcccaacactccgggaggccaaggtgggaggatcacttgaggacaggagtttgagaccagcctgggccacatagtgagctccatctctatgcaaaatttaaaaattagccaggtgtggtggtgcacacctgtagtcccagctatttgggaggctcaggcaggaggatcacttgaacacaggacgtcgaggctgcagtgagctatgatcatgccattgcactacagtctgggtgacagagtgagaccctgtcttgggaggaaaaaaaaaagttgaggccaggcacagtagctcatggctgtaatcccagcactttgggaggccaaggcgggtggactgcctgagctcaggagttcaagaccagcttggccaatatgttgaaaccctgtctctactaaaaatacaaaaaaaagaccgggtgcggtggctcacacctgtaatcccagcactttgggaggccgaggcgggcagatcatgaggtcaggagattgagaccatcatggctaacacggtgaaaccccgtctctacgaaaaatacaaaaaattagccgggcgtagtggtgggcgcctgtggtcccagctactcgggaggctgaggcaggagaatggcttgaacccggaaggcggagcttgcagtgagccgagattgcgccactgcattccagcctgggcaacagagcgagactccatctcaaaataaaataaaataaaataaaatacaaaaaaaattatccaggcatggtggcaggtgcctgtagttccagttactcaggaggctgaggcaggagaatcactggaacccgggaggtggaggttgcgccactgcactccagcatgggcgacagaatgagactccatctcaaaaaaaaaaaaaaaaaagttggaactcaaccttcttgagccactagtgctgaaggggccggaaagattcagattggctcctcttggaagctgtggatccttgtcctgtctctgctgttcttaccaggagcccctgccaaaaacctaccttgccatgcccttgagaagaaaagctttacctgcaagtacaggccttggcagcctggcacaggcgctataccctgagcagccccaacatgtgccatatcctcatatgtgctccacaagccccatcgcacctcaacagtcaggcatggctttgccacgctcagacattccgcacacaagacacgctctcattcactccaacacgtcccttgggttcagacacaactgatggccatcagattccccttacacgatggggcgtgcttgccatgaagacacgctcaaacatgctatgacacgctctgacacacaggggcacacacacacccaagcatgctttcacggggaccaggtaggtctccaacctctgccacagtctacacgcccatggccaccttgcccttccagatggattgatggggcggcggggagaaggctgttataaattaaacatcgagacactgtctgagcaccaggctctgccatccactcattggctggttccctcccaggaggctgcgggcacacagggtgggggagagggcaggggaagtggctcgcttaattaattagtcctcattgagatatctttgcaaatatccctttatcgaaggacaccattccatccgtttcctgggaatttgttgcctctatgtgtctctggcccctgagtatcgcagaaatgacaagacaagaaagagcgcgcccaagagctgctcaaaccttagctgtgtttctgatcacgacagcagcactgagggacaagcgggaaggctcagagattcagagatccaggcggaggggcagagagattaggcaaggggagatgcggaaactcaaatacaaaccgaactgcagagtcagagatacggactctgaaatgcaggaagagagagacgcaggcagagaaactttgcaactgggaggaccagagtggggacagatggacgtgcggctgggcagacaaacctcccctctgccttttcccgcctggcttggccttccccatctcctgggcaatccactctctgcagcggcaggcagcagtaacaatcaggcctgattccttttggccctagctaccctccccttccctctccctcccccaatcactcttgcaatcatctcccttgttcaaaatgagcttctgcagctgcagcccagacagctgttccatcttggagccagtactgggcctggtggctgggtcctagagggacgccctcctgagtggcagccggggagggggaatggtgctcgggggcagagggggcaaggggtcacccggagcttgggagcccacctccatctccagtcaacacttggccccatcaccagcatacccagggggtccagacactgccaatgcctctctttggggccctcaagagaggtggtctggggccgggcgtggtggttcacgcctgtaatcccagcactttgggtagctgaggcgggtggatcacttgaggtcaggatttgagaccagcctggctaacatgctgaaaccccatctctactaaaaatacaaaaattagctaggcagggtggcgcacacctgtagtcccagctacttgggaggccgaggcaggagaatcgcttgaacccgggaggtgattgagggagatcgcagtgggccaagacggtgccactgcactccagcctgggtgagagcgagattctatctcaaaataaatgaataaacaaacaaacaaataaataaataagagaggtggtcttggtcatcctgccctctgtcaccaaatccttcctaacatccaacacaggtcctggccctagaagcctctgccgtccaagaattctagtctgtttcccagggtccccgtcagggtcctatggtgagatggagatagaatcccagaggtagagacagacagacacagagagacatggagagacagacatgaatgagataaagagacagatataggccgggcatggtggcttatgcctgtaatcccaacactttgggaggccgaggtgagtggatcacttgaggtcgggagttggagaccagcctggccaacatagcaaaaccccatctctactgaaaatacaaaaaattagccaggcctggtggtgcatgcctgtaatcctagctacttgggaggctgaggcaggagaatcgcttgaatccgggaggcagaggttgcagtaagcaaagatcgtgccactgcactccagcttgggcaacagggtgagacttgatctcaaaaaaaaataaaataaaatttaaaaattttaaaaatctaaagtccctgaaagatccccctccccacgacatgatatggctcccatcaccttccttccctcacctcctctccctcttccgctcgctcactatgctccagacatgggcctcctccctgttcctccaacatgccaggcgtggtgcgatcatagctcactgtagcctccaactcctgggctcaagcaatcctcatgctttagcctcctgagtagctgggactacaggtgtgcaccaccatgcccagctaattctttttatttttcctctttttcttttttttgagatggagttttgctcttgtcacccaggctggagtgcaatggcgcgatctcggctcactgcaacctctgcctcctgggttctcctgcctcagcctcctaagtagctgggattacaggtgcctgccatcacacctggctaatttttttttttttttttttttttttttttttgagacagagtcttgctctgtcacccaggctggaagtgcagtgatgcaatctcggctcactgcgagctccacctcctgggttcacgccattctcctgcctcagcttcccgagtagctgggactgcaggcacccgccaccgtgcccagctaattattgtatttttagtagagacggggtttcaccatgttagccaggatggtctcgatctcctgacctcgtgatctgcccgcatcagcctcccaaagcactgggattacaggtgtgagccaccgggtttcaccatgttggccaggctggtcttgaactcctgacctcaggtgatccacctgccttggcctcccaaagtgctgggattacaggtgtgagccaccgtgcctggctaaaaatgtattttcttttggggttttgctatgttgtccaggctggtctcgaactcctggcctcaagcaatcttcccaccttgacccctcaaagtgctgagattacacatgtgagcccactgtggtcagcctattttaattttttgtagagacaggatcttgctatgtcgcccaggctggtcttgaactcttggcctcaagcaatcttcccacccctgccttccaaagcttgagaattataggcatgagccacagtgccactctaagagccttttgctgagaactgctcagctcctccttattcgtcccataaagcaaaaggtccccctcaaatagcacacccctcctccatctccccttccctctctccagccccccaggcagaggcgacggtcaagggtataacatacaagattcaggtattttacttcaggcctcgaaatgatgtccgtggctggcaatacagctgacagctcttagtctggtcctggatttatgatccccaggtgagaagccattccgctgaaggctcctgtcccacagggatggtttatggctgggagttggccaaaggtagtagcggcagcttcctccccacgtcttcccagagatggtctataaccacaggaatgctaagctgcttctgcaattcaggaggaggaagccagagagaagcaggacccccaaggctctacgctcaccgccccacaccactgagttcctttttaaagccaaacaccagcatccaaccttccgcctcctgactttgggaatccatactgctttgtttcctgaacccctcagcctccccgacgttggggtgctaaaccttccgacatctcctcctaaccgaacacctactgtgtgcctggtcactttccatttgttctccccagtcctgaggaaggtgaaatggatttagacacttgagaaatgtttattccaggcttggctagaggggtaaataaaacaacccctccttactaaacactactatgtgcccgttatttatttgtttttgtttgaaggaggaatccacaaatccttatgaaggtgtgattgtggattcagtcattggacaaatatttattgtaggcctatgtgcgccacaccttagggttcagtagtgagcaaaacacagatgtcttcaaggatcttaccatctcataaagactctaaattccccctgactaataaggaaatcgaatcccagcttcttaggaggctaagacaggagaatgacttgagcctaggagttccagatgttagtgagctatgatggcatcactacactccagcctgggtgacagagtgagactctttctctaaaaataataatattaataataataacaataaggaagttggggcttagagaaattaaataatttcccccaaagtcacacagctagtaaattacagggccagaattcaaacccagatatgtttgactcaaaaatcttatcactaactgagcatctgctatcttaggcactgagctgggggttttcaaacataaaaattcttgacatagaagaggcacttgatagtcttgtggaataggccaggcactggtggctcatgcctgtaatcccagcattttgggaggccgaggagggaggatcccttgagcccaggagttcaagaccagcttgggcaacatggtgagactccacctcttaaaaaaatagttttgtggaataaatacaatggatggaaggatagatgaatggatggagaggcagatggatggtggaaggatggatgcacagaggatagaaaaagagagttggataatggataatgcatgcatggaggaattggtgaatgcatggatagagatggatggatagaagaatggatccatgaaagaacagagagacaaatgatgcatcatggatagatgaaaagagatgggtggaaggataaagagatggatgtgtgaaaggatggatgtacagatggatggacagatggaatagtgggtgggtgtatgagtgaatggatggagagaaaatggatgggtagatgaaataattgatggatagatggacagactgatggaataacaggtggttggatgaatgaatgaatggagatatggatagcaagacagatggaaggatgggcgtaaaaacagatggatagatgaaataatagatggagggaaggatggatggatggatgaagagatatatggaagcgtggaaggatgggaatttgaacagcagatctctgttacccacaacaattctgtgaggtaagacatcattcccattttatagatgagaaaacaatagctcagagtgacaaaggcactggccagagtcatagagcaagttggggacaaaatctagattccaacataggtctttcagactcccaaaatggacaccctcatgtcacagtcccctcccagccctcaccctgagtaccttaacatctcacttctcagatcccttttgacaaagtataatgagactgagggatggggtggtgtcagggatgggagggccattggctttcagcaggtgaattcatggaagcattggatgaagatgctgttagctacgaatgggccagagtggagatcaggtctgtttgggcacacacacatacacacttacagaaaacacacagcacacagggcatcctacccacatgcacacaaggcaggcacacacacacactttcataaatacacacttgcagttatatgcacacacttacaaagacatacctgtccacacatatgcacacaaagatacttgcacacacgtttgcacagatacatatgcacacacaaaatcataactcatagacatgctcttatatacttatttatacattctgcagacacaccatatgcacacatttacacacacctgcatagaacacatgtacacagactcacttgctttcaatggtggtagagggaaatttggcttctgatttcaatgagataccatctctctcccttctcagatggcaacggcaagaagcctgtatcatacttgtgtataacaaactcatatgcacacatgcaatcttgtaacacaggcaaacccatagtcagggacaggcaattgcagatacacatgctgatacgtccacacccaagcacagtcactcagggacacacccacactcattctgggatgcaccctcacacacaggaaggcacatcggaccccatgccggcagtgcacataaactttctccactcccattcccccatatacacaccgaaacacacacatatagacacaccaggacatacccaaataataaacacttaatgtgacagacacacagaaacacaccgtctcacacattggctgccaagtctaagaatctagcctgaaagctctcacctgtgtcaagcccaataccacccccaccaggggctggacaaagccttctcaggtgtccccaccaccaccacacacccttgccttcgaccctagggagcaaattcttctttgctcccatcaaggagaaagaagctgcgggatgaccatttggggctaagcaagggagggttggtgaagttggggctaaagaaagggagccccaggcatcgcagcctgggtttgggggatgatttgggaggagccccccaaacagatggaacaggggtggggctaccagaggttgaggagtggggggaaaggcatatctggaggaggcccagggaagtttgcagtgaaggaaacccctcccctctctcctcaggacaccacggggagaaccccactgagttctctccttcttccctgatccagggaagctctgtagtggggaagctggaggataaagcctcaaagggggatgggatgggaaggcgccatcctggagcttctggaggcagtgtcagctccggccccagtctgcgccccgtctacctcccagggagggtgagttatggggataaatattcagcacatggcgaggcaagaatggcggaaggggtgcaggggagagaaaaagagagaaaaaaagagatacaaattctcagcgccacagagacagagacaaggaaagatagaaatattaatagaaagagacccagagacgcaaagcaggggaaatgaatagagactcagacagaactactcagagacgccgagacgcaaccaggcagagaccttgaaggtggagacactcggaaacccctcgatcctcccctctttcagagacagggtccttctaaacccccgagtctcaccctcctcccgctgcaccccactcagcccggactcagctcaattctgcagcccttgtcgcctccgccctggggccggagcgagcctggtacgctattcgcgctcagacattgctcactaataatcataataatcaataataacagcaagaaccatcctaaatggcgcggaggtggctaggggtcccggggctccttctgcctccacgtccgaccctggaaccccgagagggcgtcccctacccaggcgtgccgggcagggtcgtgggaagcacaggggtagagggggacaggtgggggccccgggggctgcggcggcggcagcggctgtggcgcgggtaccacgccccccgggagcgccccccgcgcggcggccactcacgattttctcagaggcgcccgcacgggacacggtgccgttgagccccacgagcgagggcagcgtctgcgacatccagttggtgaccatggccatggtgctcagcacggccccgatcttgagcagcggcaccgacatcgcgcctccgcctcatgccccgcggccgcccgccgcgcgtcccttctctggcccgccgcggggcgctcggtccctcgacacccaggcgccccgggggggcgtgggggagggggcacgagcgcgagctgcggggcagggggtccgggacggggtgagggggggctcggggacgcgggctgcggctcggcgcgcctggcgggctcctcttataaagcgccggctcgggcccccgccccctcccgcgcctccgcgccgggcacttccagccgccgtgacgtcacgcctccggcccggagcccggcggggggcggggggcgcccagactgcccccaccccccaccccacgccctcgcccgccccccgccgaggacctctccatggggtgggggacctccccctggtggcattccccaagcgccccaccaccaccgcggtggcattccccagccccgccccccaacggtattcccggcccccctccccctaggcggtgttcccggaccgcctcccgcacgcagaccctcttcgagcctgagccgcgggaccccgcgcgtaaaggcgccctcggcccaccccggccacccaaagacggcagggggccggagtcgcaaatccccacccacccactgttgggacacccaccctggctacctaaaacctcggacagcgggcattggggggcgtgggggggcgacacgctcgtgcgctcccatgaatcgggtcaccaagggtctcctttagctgggggaaggggcttccttcccgggcactgagaccactctaaggatccttcggtcatttcgtgcccccagggtggcgtgatccagggccagcagacgaaattgtttgggtgcaggtgcggtcctggggtcacttcggccacgggaggagttcccacgactaccaagggcagtttcctacccagggaccacggagacctggcacgcggcttttaggaggcgagtcccgggcaggtgtctacttgcaactttaactttgggtgggggcggggcactcacgcttcggaccttcctcgcggccccggggaccccgctcccggcccgctccctcgggggagcgggaagcgcagtgccctcgccgcccacccgtccgcccacgcatcagccggcggcggcagccgctgggccgcggagaggagcgccgggctagttttaatttcctctgttttgcctgcactcacgccccctcctggcgtccccgcatcacctcgctccgccgccgccgtcgccctcagcccgcggccgccgccgtctggaggcggcgatgactcaggcctttccaggcggcggcctggggctgagggctctggctggggaggagcgccaagcatgagcggggaggggggctaggggtctcgaaccgtctttttttctgagctggacaacaccaagatgcaagtgtgacctgtagggatgactgttcctctctgcctcagtttccccatctgcaaagtgggtggtggagacctaacacgtgtaaagggcttggtcatcctgagaatcaggtaatttactgagcatctactatgtcccaggcactgtgaacaacagacaaaaatgcctgcctgtgtgaaattgaatattctttttcttttctctctcttttttttttttttttggtagagatgggcatctcgctatgttgcccaggctggtctcgaacccctggcctcaatcgatcctcccaccttggcctcccaaagtgttggcattccaagaatgagcctccgggttggatgtgaagatgaatattctatggggtgagacagtcaagaaatacgggaaaaaagtaaagtacataagatattaggaggaaggggaagtaaactttaaacagagtgattggagaaagggacttttttatttatttatttatttatttatttatttatttatttgagacggagtcttgctctgtcgcccaggctggagtgcagtggcgtgatctcggctcactgcaagctctgcctcccgggttcaggccattctcctgccttagcctcccgagtagctgggactacaggcacccaccaccacgcccggctaattttttgtattttttagtagagacggggtttcaccgtgttagccaggatggtctcaatctcctgacttcgtgatctgcccacctcggcctcccaaagtgctggaattagaggcgtgaaccaccgcgcctggcgagaaagggacgtttaagcagagacctgaagtgaggaagggaaccatctggatatctaggggaagagagttccacgcaacaggaacagcaagtgcaaaggccctggggcaggagtgtttgaggaccaggaaggaggccagtgtagttggagtgagccagggggagaataaggaatgatgatgtttgtaaaatactttacaagtgtctgggacatggtaagtttttcaaatagtagctaccattgttgttattatttgaggccgggcacagtggctcatgcctataatcccagcactttgggaggccgaggagggtggatcacttgaggccaggagttcgagaccagcctggccaacatggtaaaaccctgtctctactaaaaatacaaaagttagccgggtatggtggtgcacgcctgtaatcccagctacttgggaggttgaggtgggagaattgcttgaacccaggaggcagaggttgcagtgagccaagatcgagccactgcactccagcctgggcgacagacgagtgagaccctgtctaaaagaaaaaaaagatgagttcttgccagcttgttctaaagctttcactgatgagtgctgaacactttgcagatgcaatgttaacaactgctgcaacatccataaacagtacagtgacacccctatttccaggtgaggaaactgagctcagagaggagagggacccagatcaggggaacccagcagggaagtgggggcccaggttttgaaaccaggactgtctgatttcagaccctaagaccaactgggctccaggcctcctggcttagacaatttgggacccaaacaaactttctcactctctggccatgggtgctgtgggaaactgccttagttcagcgcatccaggcttctccaaggagtggtctgtgctcgagtttgcacttgcttgcatttaactccttgcctcccacctccccaacgtttccaaaactcttctcaccaaaggtgccaatttgccaggtccacaccctcatgccagtcctcattagatcattctcacagtcagtcagtccccactcaccatcaccttcttgaaactcctttttcccttgacttcagagacacggtatcacttcctagttctgcacccacctctctggctgtgccgtcgctgtctcctgctactccctaaaactctgtatctttcagggctttgtcctgggttccctgccgctctcattctgcctggaccatcacacccactctcaaggttttggctccatctgggacactgcaacctcaggacctttgaacttcctgttccttctacacaaaatacatcaaggatgccccccatggcttgttcctttacttaattaatgtattttttagagacagagtcttgctctgtcacccaggctggagtgcagtggttcaatcatagctcattgcagcctctaactcctaggctcaagctattctcctgcctcagcctcccaagtagctgggactacagatgcgagccaccattcccggtcctttatttaatttatatctctgctctgtcattgtgtgggtcagagccatgccctgcccttcccccagaaaactacatttcccagattccattgcatactggcttcctggtcggtttatccaatgggagccactggagggagatcggagattggagaggaaggcagaagccagggtgtttctctcctgtgtctgcttggggtggagggtgttttctgacagtggctacacctcctccatagtgccagttcctccccaagggtcccttccttatcacatcctctctttgccatgtccctccagtagctttctgctgtagcttatgccagatttcctcatcatcccatgtggcttctcaactctttcttctcccacttaaccaattccctgtattaaatttcccctctctgaaacacgtagtttgtttccctaacaagaccctcagtgatatggtgatcttatccaaaggaccttccctggccacctcatctacaatctgaacaccccaccactctgtgccacttaccctactttagttgttttttgttttgttttgttttgagatggagtctcgctctgttgcccaggttggagtgcagtggtgaaatctctgctcactgcaacctccatctcctgggttcgagtaattctcgtgcctcagcctcccaagtagctgggtttacaggtgcatgccaccatgcctgggtaatttttgtatttttagtagagatggggtttcaccatgttgaccaggctggttttgaactcctgacctctagagatccacccacctcggcctcccaaagtgctgggattacaggcatgagccaccatgcctggccactttagttcttttatctttttttttaaggcgaggggctgggcactctgttgcccaggctggagtgcagtggtgcaatcatagctcactgcaacctcaaactcctgggctcatgtgatcctcctacctcagcctcctgaataggtgagactacagaggcacaccaccgtgcccagctaattttttaagttttctgtagagatggggtctcactatgttgcccgggctggtctcaaactcttgggctcaggcaatccacctgcctcagcctcccaaaatgctgggattgtaggcataagccaccacgccagaccctaaaactctttttaaagacccagcaattccatctacccaagagaaaccaaagcatatgtctatgaaaagacctaaacatgaatattcatagcagcattggtcataatgaatgaaacaatccaaagacccatcaactggtgagtgaataaacaaattgcggtacatccatacaatggaatgccattccaccataaaaaggaatttgctcctgatatatgctacaatgtggatgatcctcaaaaacattttgctaagtaaaaggagccagacgcaaaagaccacatagtttatgattctatttatacataatgtccagggacagcaaatcaatacagacagaaagtagacgagagattgcctgcaagtgggggtgggagtggagatggaatgcaaatgggcacgggggctgttttggaggtgatgaaaatgtcctaaaattggatcggggtgatggctgcacaactctgtaaatttacgaaaagtcactcaattgcacgcttacacaggtgaattttatgctctgtaaattatacctccataaaactgctgaaaagggaagatccaccaggcacggtggctcacgcctgtaatcccagcaccttgggaagctgaagcgggagaattgcttgaagccaggagtttgagaccagcctgggcaacgcagtgagacctcatttctctctcttttttttgagatggagtctcgctctgtcacccaggctggagtgcaatgggatgatctcggctcactgcaagttccgcttcccaggctcatgccattctcctgcctcagcctccggagtagctggggctacaggcgcctaccaccacgcccggagaattttttatatttttagtggagatggggtttcactgtgttagccaggatggtctcgatctcctgacctcgtaatccacctgcctcggcctcccaaagtgctgggatttacaggcatgagacaccttgcccggccgagacctcatttcttcctattcatttatttatttgagacagagtctcgctctgtcactcaggctggagtgcagtggcctgatcttggctcactgcaaccttcccctctgggttcaagtgattcccttacctcagcctcctgagtagctgggattacaggtgcacgccaccacacctggctagtttttgtatttttagtagagatagcattttgccacattggccaggctggtctcaaactcctgacctcaggtgatcctcctgcctcggcctcccaaagtgctgggattacaggcataagccaccacacctggaccactgccatttttttttttttttttttttttgagacagagtcttgctctgtcacccaggttggagtgcagtggtgagagctcggctcactgcaatctgtgcctccagggttcaagtgattctcgtgcctcagcctcctgagtagctgggattacaggggcaagccaccatgctcagctaatttttgtatttttttttttttttagtagaggtagggtttcaccatgttggccggctggtctcgaactcctgacctcaggtggtctgcccaccttggcctcccaaagtgctaggattacagctgtaagccaccacacctggcccctccccaccaaaaaaatttttttaagtagctgggcatggtggcatgtccctgtagtaccagctacttgggagactgaggtgggaggatcgcttaagcccaagtgtttgaggctgcagtgagctatgatggcacctctgcactccagcctgggcaacagagcaagaccctgcctgtacaaaagggggaggcatttttaaactttacttgcaagctccctctttgaggtgccctgcactgtactaacacaagaataggtgtctccttaaattttgagcccaagattccttgcttgcatcaccctggtcctggcaatgatgtacccacggtcagaaatgagagattatttactttttacccctccttctccatcactcctcttctattcaaaccagcaccagagccagctaatcctgatgcagaaatatctcaagaaagtgtcccctcttccccatcatcatcactgtgaacatcgtgctggtaagccactgaaaaaaaatgtttcttctggggctaggcgcggtggctcatgcctgtaatcccagcactttggaaggctgaggtaggcagatcacttgaggccaggagttcgagaccaccctggccaacatggcaaaactctgtgtctactaaacatacaaaaaaaaaaaaaaaagtagccaggtgtggtggcacagacctgcaatcccagctacttgggaggctgaggcaggaaagttatttgaacctgggaggcagaggttgctgtgagcagagatcacaccactgtactccagcctgggcaacagagtgagactccatcttgaaaaaaaaaaaagtttatttcccttgaaatttctgggtggtaaaaaactcgtaactgttggaaaaatatcaataattgctgagatttatttagtactatcatgttccagacaccatttgcagcaaagtacatgtaacaactcatttaaccctcagaatacctatatgcaacagacagaattataattttcttttgtttgttttgggattttgttgttgttgttttgagacagggttttgcctaccgtcacccaggctggagtgcagtcacatgatcatacttcactgtagcctcaacctccctggctcaagcgatccttctgcctcaaccttccgagtagctgggactacagtcacatgccaccatgcttggctaatttttttttatttttggtagaaacagggtcttgccatgttgcccaggctggtctcaaactcctgggctcaagcgatccccttgcctcagcttttcaaaacactgggaagacaggcatgagccactgcacccagctaggcaaaggtttttaaaataggacactaataagcactagccatgaaagaaaaaattatttgaactacattaaatttttttttttttttgagacggagtctcactctgtcaccgaggctggagtgcagtggcatgatcttggcttgctgcaagctctgcctcccgggctcatgccattctcctgcctcggcctcccaagtagctgggactacaggcgcccgccaccacacctggctattttgtatttttagtagagacggggtttcaccatattagccaggacggtcttgatctcctgacctcgtaatccgcccacctcggcctcccaaaatgctaggattacaggcatgagccaccacacccagcctgaactacattaaaattaagaaatcctggctgagtgcagtggctcacgcctgtcatcccagcactttgggaggccggggcgggaggatggtttgaacccaggaatttgagaccagcctgggcaacacggtgaaacaccatctctaaaaaaactacaaaaattagctgggtgtggtggtgtgcacctatagctccagcaactcggcaggctaaggtgggaagatcgcttgagcccgggagatcgaggctgcagtgagccgtaattgcaccactgcactccggcctgggcaacagagtgagaccctgtctcaaaaaaaaaaaaaagaaatgaaatgaaattaaggaattctattgattaaaagacaccactaagagaatgaaaagaaaagctacagagaagatatttgcagtcattatgtccaataaaaatctcatatcctgattttatagttatgtaaaatatgaatatgtatctatgtaaaatctagatacacacacacacacacacacattcctacaaatcagtaagaaaaaaccagacatctgaacagagaagtgggcaaaagacttagacatttcacaaaagtggatatccaagttgtcaataaacatatgcaaaggcacttaattcatcatcaggcacatcactcatcatcaggaaatgtaaatgaaacccacaatgttcccagcactttaggaagctaaggtgggaggatcacttgagcccaggagttggagaccagcctaggcagcataaccagaccctgactcaaaaaaacaaaaataaatttataaataaacccacaatgcaatactatttggcacccatcagaatgtctaaaactaaaaaaaggccaggcacagtggctcatacctgtaatcccagtactttgggaggccaaggtgggtggattgcttgagctcaggagttccagattagcctaggcaacagggcaaaaccccgtctctacaaaaaaattcgccaggagtggtgctgcatgcctgtggttctagctacttgagaggctgaggtgggaggatcgcttgagcctgggaggttgaggttgcagtgagcacagatcgtgccacagcactccagcctgggtgacagagtgagaccctgtctcaaaaaaaaaaaaaaagaaagaaaaaaagaaaagaaaagaaaaagaaagacaacaccaagtgttggggaggatatggagcaactggaacacttcatacactactggtggaagagttgttgactttttggaagagtctctgaaactttggaagactgtacagcagtttctccctatgacccagcaattccactcctacatatatacagttgagcttcatgattcgaaaattccagattggcaaatttgcctacttgttgcaatttgtttatactctaagatcaatactcgctggggcatttgtggtcatttgtggacatgcacagtgataattttttttttcttgcttagaaacagggtggagtagctgggcacggtggctcatgcctgtaatcccagcactttgggatgccaaggtgggcagatcacttgaggtcaggagttcaataccagcctggccaacatggtgaaatcctgtctctactaaaaatacaaaaattagccaggtatggtgggtgcacacctgtaatcccagatgcttgggaagctgatgcacaagaattgcttgaacctgggaggcagaggttgtagtgagacaagatcatcgccactgcactccagcctaggcaacaaagtgagactgtctcaggaaaaaaaaaaaaagaaagaaaagaaagaaagaaagaaggaaagaaaggaaagaaggaaagagagagagagagaaggaaagaaaaggaaaggaaaggaaaagaaaagaaagaaaaaagaaaagaaaagaaagaaaaaagaaaagaaaagagtgcagtggtgggattgcctttacctcctgggctcaagcgatcctcccaagtagctgggacttcaggcatgcagcaccacacttagctaattaaacaaattttttttgtagagctgggcgtggtgcctcacgcctgtaatcccagcactttgggaggctaaggcaggtggattacctgaggtcaggagttcgagaccaacctggccaacatgtcgaaaccccatctctactaaaaatacaaaaattagccgggcttggtggtgtgtgcctgtaatcccagctactcgggaggctgaggctcaagaatcacttgaacccacgaggtggaggttgcagtgagccgaggtcgtaccactgcatttcagcctgggcaacagagcaataacctcgtctctacaaaaaaaaaaaaaaaaaaaaaaaaagcccgggcgcagtggctcacacctgtaatcccagcactttgggaggccaaggcaggcagatcacgaggtcaggagatcgagaccatcctaacacggtgaaaccccgtctctacaaaaatacaaaaaaattacctgggcgtggtggcgggcgcctgtagtcccagctattcgggaagctgaggtaggagaatggcgtgaacccgggaggcggagcttgcagtgagccaagatcacaccactgcactccagcctgggcgacagagcgagactctgtctccaaaaaaaaaaaaaaaaaaaaaaaaaaattgtttttgaaatggaggtctcgctctgtcgcccaggctggtctcgaactcctgggctgaagccatccttccgccttggccacccaaagcactgggattatgggcgtgagccattgctcccggcctgacaacatactcagtcacccaaccctgttgaggtctaataaggagacactctgctttcttcctccagctctgatactacatgcaagtgtcttttttatggtccatttagtgccaagcttttcatatttttgtgctgtttgttggtgactctgctatcttcagtggcccccacgcaccgtgctgaagtgtagtctagtgtttctaagtcaagaaggccgtgacgtgtgtcacggagaaaagacgtgttacagaagcttcattcaggcatcagatctagtgctattggccgggagttcaatgttaatgaatcaaaaaataaatatatatgtgatatatatatatatatgcgtgtatatatatagatatgattgatatatatatatgatattctaaaacagaaacacacataaaacaaagttatggctgggcgccgtggctcatgcctgtaatcccagcactttgggaggctgaggcaggcagatcgtttgagcccaggagttggagaccagcctgggcaacatggtgaaatcctagctctacaaaaaattagccaggcctggcggtgcatagtcccagctactcagcgtgttgggaggctgaggtgggagaatggcttgagtccggaaggcggaggctgcagtgagcctagatcacaccaccgcactctagcctgggggacagagtgagaccctgtctaaacaaaacaaaacaaaaaaagttatatattattcagttgacaaaaacgttgtggtcagaggcttttgacaaaaatagcaagtgttggtgaggatgtggaaaaataggaaccctttgtgggaatgtaaaatagcgcagtcgccgtagaaaacattatcgtagttcttcaaaaacttaaaacatagttaccatatgacccagcaatactttttcttttttgagacaggatcttaccctgtcacccaggcaatggtacaatcatggcgcactgcagccttgacctcctgggctcaagtaatcctcccacctcagcctcccaagtagctgggaccacaggcacagctaatttttgtatttgttgtagagacacggtttcaccatgttgctgaggttggtctcaaactcctgggctcaagcaatccacccacctcagcctcccaattgctgggattacaggtgtgagccaccgcgcctggcccagcaatgccacttctgaatacgtacacaaaagaattgaactcagtgtctcaaaaagatattggtacacccgtgatcatagcagtattattcaaaaaagcccaaaggtgaaaacaaccaggccgggcgcggtggctcacacctgtaatcctagcactttggaaggctgaggtgagaggattgcttcaggccaggagttgaagaccagcttgagcaagatgacaagaccccatctctacagaaaaaatttaagaattagccagccgtggtggcatgcacctgtagtcccagctacttgggaggctgaggtggaaggatccctggagcccaggagatagaggttgcagcgagctgtgatggtgccactgcactccagcctgagtgatggagagagacctcctctgtaacattaagacttttttttaaaaaaaagctgaaaacaacccagtgtctatttattgatgaatgaatggataaacaaaatgtggtatatccatacatggaatatgattcagcctttaaaaggatggaaattctaggccaggcatggtggctcacgcctgtaattccagcactttggaaggctgaggcgggcggatcacgaggtcgggagatcgagaccatcctggctaacatggtgaaaccccatctctactaaaaatacaaaaaattagccgggcgtggtggcggccgcctgtagtcccagctattccggaggctgagatgggagaatcgcttgaatctgggaggcggagcttgcagtgagctgagatcgcgccactgcactccagcctgggacagagagcgagactccatctcaaaaataaataaataaataaataaatgactaaagtgataaattttatattatgtgtattttaccacaattaaaaatttttaaagtcttccatttaaacatgcacaacctcttctatgagtcactattaccagctcactaaattctaggccaagtgcagtggctcacgcctgtaatcccagcagtttgggaggctgaggcaggaagatcttatgagcccaggagttcaagaccggcctggacaatatagtgagaccctgtcactacaaaaaataaacaaaaaaaattatgtgggcatggtggcacacgcctgtggtcccagtgactcaggtggctgaggtgggaggattgcctgagcacaggagtttgaggctgcagtgagctgtgatcgcgtcactgcactccagcctgggcaacagagcaagactctatctctaaaaataaataaataaggtccagcacggtggctgacgcctgtaatcccagcactttaggaggccgaggcaggcagatcacgaggtcaggagtttgagaccagcctggccaacatggtgaaatcctgtctctactaaaaatacaaaaattagccaggcgtggtagcacgcgcctgttaacccagttccttgggaggctgaggtaggagaattgcttgaacctgggaggggagggttgcagtgagctgagatcgcaccactgcactccagcctgggcgacagagcgaggctctgtctcgaaaaaaatataaataaataaatgaataaataaattctaaaatccttaacccagctttcgaagcctttacagtcagatcacaaccttttcaagctcacttcccttctcctatctgcacccaccataggcatcaaccacacacttaccctagttcccatttccagaaacttcccctcttttaaacatggttagaatcatgtaaaataagggtaaacccaccaggtcttgtcagcatgaccaatgactttcttctgtgtccaccctccagtcttcactcgctcatccttcaaggcccatctcaaatgccacctcccccaggaagcccacttgactcttgacatctggcactttgtaccatgtgtcggctgcatctgtctcccaaatttggcaactgacagccattcagagcggactgtgtcacgtccctcctgagtgagtgagtgcctctatcagtgtctttctcatagaaattactagagaaattaggaacagaaacaatgtgggccgggtgcagtgactcatgcctgtaatcccagcaccttgggaggctgaggcggatcacttgaggtcaggagttcgagaccagcctgaacaatattgtgaaaccctgtctctactaaaaatacaaaaattagctgggccctgtggctcatgcctgtaatcccagcaccttgggaggctgaggcaagaggatcacttaaggccaagagttcaagaccagcctgggcaacatagtgagacccccatctctaccaaaaaaaagaaaaagaaagagaaaaattagctggatgtagtggtacacacctgtagtcctaactatttgagaggctaaggtaggaggatcacttgggccaaggaggttgaggctacagtgggctgtggtcacaccactccactctagcctggtcaacagagcaagaccctgcgtcttaaaaaaaaaaaaacaaaataaaatttaaaaagaacccggctcaccatgtgctcatcatgtattcttcctgggattcaccaggactctcttagagcctaaaaagtgagaagctatttgccatttcatttgatggctgaactggctttgcctttttgtttctttcttcttgtgcaatgacacctgtcttctcatctattaagcaaggctagttactagctgcccaggattgttggaactatgtgtaaagtaagagtaaactgggaccgagagtctactgggtccccaggagcaacaagaacaaccttttccaggctggatgcagtggctcatgcctgtaatcccagcactgagggaggccaaggtgggtggatcacttgaggccaggagttcaagaccagcctgggcaacatggcaaaaccccgtctctattaaaaatacaaaaactagccaggcatggtggtgcacgcctgtagtcccagctacttgggtggctgaggcatgagaattgcttgaacccaggaggcagaggttgcagtgagatgagatcgtgccactgcactccagactgggcgacagagtgagactctgtctaaaaaaaaaaaaaagagagaaagagaataagcttttgtatacagtcttcatggaatctactctccctactctctgctctttcctggtgacttcttggtttgtggctgcactctggatggatgaagttgcaagacacactgaggtggtgtgcacctgtaatcccaactacttgggaggctgaggcaggagaattgcttaagcccaggagttcgaggcctgcctgggcaccatggcaagaccccatctcaaaaagaaaaaaagagatagaatgggcttccaccttggcagggaggacatgtcaatgttctcagacaagagttccctagatatgggaataaaatgttcctgtcatgacaagttttttcccaacacagccagactcaactcctccagaagttaaatctactccaccccttgaaagcacaaactaccacccagtgcttgttgcatagtacaacgcttgagatacagaaggctctcaatgaatgctctctaaatgaatacatgggccgggcgcggtggctcacacctgtaatcccagcactttgggaggctgaggcgggtggatcacctgaggtcaggagtttgagaccagcctgaacaacaatatagagaaaccctgtctctactaaaaatgtaaacattaggtgggtgtggtggtgtgtgcctgtagtcccagctacttgggaggctgaggcgggagaagagcttgaactcgggaggtggaggttgcagtgagccgagattgcaccacttcacgccagcctgggcgacagagtgagaccccgtctcaaaataaaataaaataaaataaaataaaataaatgaatacatgcatgtaggaacaaatgaaaacagcacattactgtctctcaggcactaacactgaatcctggggctacaaagtcattgcccacaccagccactgggctcatcagaaacccacacataccaggccaggcgtggtggctcacgcctgtaatcccagcattttgggaggctgaggcaggcagatcacctgaggtcaggagttcgagaccaacctgaccaacatggagaaccctcgtctctactaaaaatacaaaattagctggatgtggtggtgcatgcccgtaatcccagctactcgggaggttgaggcaggagaatcacttgaacccaggaggcagaggttgcggtgagccgagatcgcgccactgacctccagcctgggcaacaagagcgaaactccatctcaaaaaaaaaaagaaagaaagaaagaaatccacacataccatatggttggcctacatggatacagtcactggtgtgatgatgatacaagcatgtccctgtgctcatggtccctgaacatgcacacagtcaccaaacatacacatacacgcatgacaccacagacacatgcctatggggccaaagttagagtgaggcaagttatgcaagtgcagagggggagcccatatttatttaaaaatttgtttttattcattatagatttttcttgcatcaatttagatttttcttaaaatgttccattaaaatattatttatcttggttactggtttttatttttttggggggcatacccttaaattttgtactatagctgaactctgtaccatgtacctgtcaccctagctactcaggaggctgaggcagaagaatcacttgagcccaggagttggaggcttcagtgagctatgactgcaccactgcactccagcatgggtgacagaacaagaccccgtcttagaaataggcccggcaccgtggctcacgcctgtaatcccagcactttgggaggccaaggcgggcagatcatctgaggtctggagttcgagaccagagtgggcaacgtggtgaaaccctgtctctattaaaaatacaaaaaaaaaaaaatttagccggctgtggtgctgtgcgcctataatcccagctactcgagaggctgagcaggagaatcgcttgaacccgggaggcagagattgcagtgagccgaaatcgcaccactgcactccagtgtggacgacacagcaagactctgtttcaaatatcatcatcatcatcatcatcaactttttaaaatgtttgcacccgcggcgagtatctcacctgttttaccctgacctgggcacccccatcccacatacgcacgcgcccacgcacaggtgcacaaccacacacattcacccaccagtcacacagacgcacacagtccctgcacaaacctcactcgaccactagatgtcgctcaagctccataatcttaaatccagccccaaggggctctttcctacactaactcggagtctttaaatttccttttacttccctccactgggacatttacatgctctaaaggagccccaggagaacatcgtcttacccctaaacaacagtgccctatcggtggaatgtcaggcacaggtaaagaagatgggttttctttctttcttttttgtggagacagggtctcagtctgtcgcccaagctggagtgcagtagtgcaatgatagctcactgcagcctcaaactcctgggctcaagtgatcttcacacctcagcctcctgagtagaactacaagcctggccaattttttttaaagttactgcagaggccgggcacggtggctcacgcctgtaatcccagcagtttaggaggccgaggcagacaaatcaagatgtcaggagttcgagaccagcctggccaaaatggtgaaaccccatctctactaaaaatacaaaaattagctgggtgtggtggcacgcccctgtagtcccagctactcgggaggctgaggcactagaatctcttgagcccgggaggcagaggttgcagtgagctgagatcatcacaatactgtactgtactccagcatgggtgacagaacaagactccatctcaaaaataaaaaaaaaaaaagaaataaaaagaaaaagttattgtagagatgggatcttgctgtattgcccaggctggtctcaaattcctggcctcaagagaccctctggctttggtctcccaaaatgctgggatcataggtatcagccatcacacctggcctgaagaatggattttcttggtgccttccatccaggagcgagtgttcccctgacactctcttgataaaagaatcctgtggtttgagaaagaaagacactctgtgtgtgtgagggggtccatccatccatccattcatccattcagcagatatttcttgagcacctactgtgtgtcaggctctgctctagacactggagaaacaacaaagctagctgaaccctgataaactgccgctctagtggggaaacagagaatgaatgaatagaagaatcatagaaatgtggaaacgagggctataaagaaaaatatggccgggcgtggtggctcatgcctataatcccagcactttgggcggcagatcacctgaggtcaggagttcaagaccagcctggccaacatggtgaaaccctgtctctactaaaaatacaacaaaaactagctgggcatcaggtggcacgtgcctgtagtcccagctactcgggaggctgaggcacgagaatcacttgaaccggtgaggcaaagcttgcagtgagccgagattgcgccactgcactccagcccaggcaacagagtgagactcagtctcaaaaaaaaaaaaaaaaagaaagaaagagagagaaagaaaaagaacacggagtaagcactcagagagtggcagcagggggctatttcacttagctgttcagggtgagcctcttggaggaggtgacatttaagcagaaatcagagataaatagctaccagggggaacagtgtcacaggcagagggaacagcaagtgtgaagtccctgaggcacgtgatctaaactgaattattccttctccccatcctctgaaagccccaggaaagagttggtcccaaacccagatagtgccaacgatgtagctagatcttagggaggccttcgcagggatcaggaaggcatcttttccacaaggaaaatagtggggctcagaactgtcaagctctctggtagtcactcccaggccagaacccagaacatcttggatagatcctggatgaatggacaatgcctctgacaggccctgctttcctgttctcctgctctctgggtcaaatccaaacttctgcccacagcttacaagttcctaagtggtctggcttccccggcctcatctccccgcgacctctccagccacaccagcgtccacactgcttctgaaactcaccaagcttgttcttaccccagggcctttgcaccttctgttcctcccaccttcaatgctcttcccccagacacccacaaggctccctctctcacctccttcagatgtcacctgaaacactacttccttagagacaccttccctgaccacactggctcaaatagcccccaccttgtaatctttttctgtttttttgctttgagacagtcttgttctgttgcctaggctggagtgcagtggcatgaccttggctcactggaacctctgcctcccaggttcaagcaattcgcctgcctcagcctcctgaatagctgggactacaggtgtgcaacaccacacctggctaattttttgcatttttagtagagacggggtttcaccatgttggccgggctggtctcaaactcctgacctcaagtgatccactcaccctggcctcccaaagtgctgggattacaggcgtgagcctccatgcccgactgctatcactctaatcttttttttttttttttttttttgagacagagtttcactcttgttgtccaggctggagtgcaatggcgatcgcagctcaccgcaacctctgcctcccaggttcaagcaattctcctgcctcagcctccctagtagctgggattacaggcgcctgccaccacacccagctaattttttgtatttttagtagagacagggtttcactatgttggccaggctggtctcgaactcctgacctcaggcgatccacttgcctcaacttcccaaaatgctgggattacaggcgtgagccacagcacccggctccagtctaatcttctatactttatctgttattcttcatgctacttgcattgtattatatgtatatttagttgccgacaccgtattacatggttattcggctcttttctgtctcctctgctaggtcaactccaggagagcagggatttgatgactcagttggtggctgtatccccagtgcataatcatatctgttcattgaatggattaaccaatgatttctaggaaggacccctgggcccatcagggacagggaagaagtctttggaaagtgatggagggagcgaagagtgggtagagcatcctctctgcagacccctcccttccctggggtgccaggcttggtgggccaacgccaagggggtgtatggggcgccgagactgtttcacaaccatgtagttcccgcggtggccgcctggaggcactgcagcccgcggcaggattccaccagccccgccctaacggattacctcatttggccacgcccccgttgtcctttagccccgcctccactgacctcgttagtcccgcccccaaagcaactccctcccagccctgggggctgtaggagtcaccctccaattgcaattctggcagcaaactctggcatcctagccaatcttggtgagaagccagaaaatctagtgcccccctagcagggagtggaggagaagccacagggggtggttctctgtctcctctgctaggtcaaggataattcaacttgattcctggctcattttttttccactggtttctcaagtgtgtgcctcttttggtctctcgtctcccaggtgtgtctcttggcttctctcaggctcacacatccattgagtacctattgtgtgtgtcctcatgcctggggctgggcacactccctatcccacccagcgcgtgggtgctgagatgcgtggggaaatggaggagcgagggaggggaccccacaatctctcctcgtggcctggaaatccttctatctggagtctaacctccattcctcccaacacccccctcggggtgagcacaagggtctgattcttttcttgataaggggaaggtgcccaaattgtttctcccctgcctatctacctaaaagcccacctagcaatgtcttcacggacgctgtccacacccatggagcggattatttaacaagagggtaatcgtgtgggctcaggagccggactgcctcggttcagtcccacctctgtcactctcgagcttgagcaagtgatttaacttttctgcgcctcagtttccccatccataaaatgaggtaacaataccatgctctagtagggaggaggcagagggggttaaatgccttagtctgtgctgtgtgattgaaacagcacctctcaaattagcacgtaatgaatgatcactgttatcataatgactattttattatttttgatcccagcttccctgtgaactcctacagatctgagaacttgggggtgctctcactcccaagatggaggaggagaggggctttccaatagcaaaagagagcgtggacgccccacattttgcaagcctccctgagcctgcccaagagaaaggtgccatggggagggagacccgcttctgtaagggtatgaatggcgtgtgcggttgtgagcaaggcaccaagatacacacacacacgtgcatggatggacacgtttgcacacacagcgcttgcacacacacacacccttttagagtgatttacccaaaggtacagaatagcacacgctcactccaaggctctcacacggccacacacctggccacacacgtattgtacaacacccagtcatctggagccagtaatgaggacacggtcacacacagactctgtctcacgtactgatcacaccccaactcgggcactagttggacaagccccccaaccgccacacacacaaactccccccggtcacacccaaccacgacacaaagacacacacgtttaccctgcacccccacagcatttcacacgcgtccccgtcagtcactctcacgtgagtcccgtcccctgccccacactgggggctgcaggcgaggagtggagggcttcagaaactgggcatctcggccccgaagaggaagtcaagggtaagcaaccgcccccctccaatgccccctgaagtttccctcccaaccccattcagctccagcgagatggcggggtgggggctcggggccatggaggggttgagaaccccaaagacgccaccccccaaaccagcccagcttgaggctggatttgaagcccccctcgtcctctcccaagccagagagtgcacgtcccggcccctcccccgctgcgacccccgcccctcgccgccctgcagctgggggggcttgtggagcctcccaaccccgtttctccgggaaccctccgcgcccccctcctctcccggagccacccgcgcccgcacctgcccgccgggcccctacctgtccggccaggcctgagcacagcagcagcagcagcggcggcgggaccgtgagcggccacatgacgcgcccctagcccggcgtcccgacccccgcccgccctagcggcgcctcggcgcggggaccgccaccaggcgcgaccccgcccgcccggccggggcgaccctgcgccgccgcctcccccgcctcgccggcggccgggattccgccccacccccgccccctcgctcgctccgagtctttgttgcgggctccgccccccgccccgcccccagctcctcttcgggagcagctcgagcagggtcgggtgggggggtgggggcggggaagtgggggagccagcgccggcgaggggacctgaggacaggacttggcagcgccccccaacccccaggccattccgggagcgggtcgcggaggtgggggaggggtgcccgtcacgtgtttgtaaatttcaccctccgggggcatttcccacgttgcaggtgggacggggacgaatggttgggggagaggaataggaggaaggcctggtagcagagaggggaaatgatgaacgccccctccctaaaaactcaagagtcaacagggaaactgaggcagaatctgaaattggaagttggaggaggggtcaatgccaggacaagaggggtgaggcatagatggagacggggaataagaggaaaaaattgaggttggggggacaggagaccgagaatcaggcaagaggccaatggaaatggccacgtgggtgggcttggcctcaaaaaggggcgtctcgttttcactctccccgggcgccccatttccccaccagtcctcccgctggaagcctccccgcctccgccacacctggaagagtttctcttcgctccctgtttcaatagcccaagatgaaagaccacatcccccgagagaatcaaaatattaacaccgcctccacgcgaagccatttgcatatgaagggcgtccttgtctagcctcactttcgggaggctttccagcctttctctgcctctcactcctccaaaagtctccctaggccgggcgcggtggctcacgcctgtaattccagcaatttgggaggctgaggagggtggatcatctgaggtcaggagttcaagaccagcctggccaacatggcaaaaccccacctctactaaaacatacaaaaattagccgggcgtggtggtgcatgcctggaatcccagctactcgggaggctgagacaggagaatcgcttgaacccgggaggcagaggttgcagtgagcagagatcgtgccattgcactccagcctgggcaacaggagcaaaccttgtctcaaaaaaaaaaaaaaaaaaaaagtgtccctagtcgtctttcctccccacagcccctctagggattcggatatatgtaggcagaggtggaggaggggggcgggcaaataagtcagattggaaagaaatcgggcataaaatatgcgaggccaggaagcctggcatttttgtgaccctgatactgttgggctaggaggggtctccccagacgctggtggggcctcgaccccagctggtgtccaggctcttaacaccatcgcaagaatgaattcaaggaggaatcagaaaatcatgaaaagttcggagatttttttgttaagggaaaagtccacacttgagaaaagggagtgggcgtacttaagagagagagatgggcaaggtggtttgggactgctacctttatgtgtctctttttttttttttttttttttttttttgagacaaagtctcgctctgtcacccaggctggagtgcagtggtgtgatctcggctcactgcaacctctgcctcccaggttcaagcaattctcctgcctcagcctcctgagtagctgggattacaggtgtgcgccatcacagccggctaattttttgtgtttttagtagagacagggtttcaccatattggccagcctggtctcaaactcctgacctcgtgatccacccgccttggcctcccaaagtgctgagattacaggcgtgagccaccacaacaggccactgtgtatctctttaaccaagggatggaatattcatgaaaactggaaaaaggtggactgtggtgccacccacttttacaccaaatttgggtgtccctggaattgtcaagggcgctggtgggtgggtaattttagtattttaatgagtacataatgagatcctaggtgaaacctaggtagaatgtaacgccatgttgggtccagtaggtcttagccagcttggtccacaccctggttttcaggatcttatcagcccatagcctctagtcatgtgaaacggctgcctgtgaccaccctggatcattcctgtctcaaccctactggggataaaacatgtcgatgatggttttgtcaggtcaatgagaaagagcttggtgacccacagatctgggttcaaccctggtgctgccacttcttggccatgtgaccttagggaaaaagctttccccctcttagaagacctgttttttgcagttattgggagacatctgtgactctaagcaaagagagcacctagctagcactcactccccagcacgccttgcaataaccaaccatgcactgggttgaggacactcatcatgggatgtggacacaaaatagagtctgagcctgcgaagacatcctgtttattcttctatctcttttttttttttttttttttgagatggagtctcacactgtcacacccaggctggagtgcagtggcttgatctcggcttacaacctctgccttccgggttcaaggaattctcccgcctcggccttccaagtagctgggattgcaggtgcctgccaccaggcctgtctaatttttcatatttttagtagagatggggtttcaccatattggccaggctggtcatgaactcttgacctcaggtgatccacctgcctcagcctcccaaagtgctgggattacaggcatgagccaccgcacccatcctattcttctatctccttttcccaaatgggagacagtcctttgtgggcccttcaggccaagcctgcagttggcattgcataaaaggaggacattggttggtaggacccacaagctcttgaccaagagtgggtctcacggtcaagagtcagcactcttgactcatgaatgctgcatttcaggaccatgaacagtgtcctccttgggctctggtcactaagacgatcacagttacaactaagctacagcctgtgttatatggttggaatttggtcgatatgcacttagatctattccccactttccccctgctcccctctgtatcagggcaatggctcctgcaaattatctttctcaggttctctacacactacatttcccaggcttctttgcatctggttaggctcagccaatgggaggtctacaggcagattggagggtgccaagaaaggagaagccagagaatttccccccctccactttgagtgtctctagccatggctgctgtgcctcctctgtggtctcagtcccattaggtattccccaccatggtggggggtgggggcaggtgactggccaggtaactgcagctcctggattcaggtaactaccacctccctttgttgtttcagtccttgcaaagatgatagctagcaactagagttgattcacctgctccagtttgcgcttaaaaccaacctaatagggccaggtgcggtggctcatacctgtaatcccagcactttgggaggctgaagtgggtggatcacctgaggtcaggtgtttgagaccagcctgcccaacaaggcaaaatgctgtctctactaaaaatacaaaaaattagccaggcatggtagcaggtgtctgtaatgccagctactgaggaggctgaggcagaagaatcgcttgaacccaggaggtagagattgcagtgagctgagatcatgccattgcactccagcctgggcaacaatagtgaaactctgtctcaaaaaagaaaaaaacaaaaacaaaacctacctatcggctgagtgccatggctaacacttctaatcccaacactttgggaggctgaggcaggtggattgtttgagccaaggagttcaagaccagcctggccaacatctctgtagagatgctgcatctctaccaaaaatacaaaaatgagccaggcatggtggtgcacacctgtagtctcagctactcaggaggctgaggtgggacgatcatctgagcctgagaaggtcgagactgcagtgagctatgattactccactgcactccagcctgggcaacagagtgagaccctgtctcaaaaaaccccacaaaagcaaacaaacaaacaaacctacctacctaatacctcagtgtgtggctaattaaagtccccatattaaattctttctattgaatttgctgggatgggctgtttttctgactggaccttagtcaatgcattcgatgccgttggtcgttgactggtatggttagtggccctctgggtgtcctgatggcattgtggtttgtgtcctgttgaaccgggatctgtgctgccgtcaacatcctggttctgccagggtcagcattgtggtcagaattgtggtcactcctggtcattcttggttgtgttgtggtcagtgtggtgattagtactacagtcagtttcctggttatgctgtgctctgtcctagtgctatggtccttgtcctgagcttgctgtggataatgacctggccaagctatggtcaaaattatgattgagtcatactaaggtcaaagtcacactcagcatcctagttgcactgatatcagcttcaaggtcagcactgtggttaatgttaagaagagtgcactgtctatggtgcagtggtcagaattgtgggccatcattgaagagacatcaggatccgcttctcaaggatctattgtggcaaaatggatgaactggggactcagggtctggcactgggcacaggtcattctccatgacaggaagcagggaggcagggcgttggatcttgccatctggccattgggtttttctaattggcacttggacagccaattagacaggaacttggacagccatgggttcctgtcaccctctcacagcccacatctgtttcctcacaccctgcaccacccacttcatagagaaaatgatcatgaagtgaatgcctgccaacacatacctttgctcttgctaatccctgaatatattatttagaggtcctttggtagaatttagcagaaactcaacttgaactggattaagaaaaaaaatctattggctcatataacttaaacaaaaatgagggtagtggaattcagtcatggctggatccagggtttctgttatatcatcaggattctgtctctctccattcctcatctctcatttctcatctctcatttctcattccatgctgtcttttgggaaggattcacttttagccaagagatgacaaagatggtttccagaagcttctctcttccaagctcagcagcatcagcaaaaagagagcttgcaaaataatgtctcattatgcatcccaagttgtgtgcccatcctgaaccaattatgtattcagaggaattcattatttggcttggctaggtctggctcatagatcacccccacggagccagagagtgcagttagccttattcaacctacattggataggaagtgggaggtagagaaggatatagaatgttgaccactaaaagagagaaaggacactgtacaagcaaaaccaaaatatatggttttgggcagggggtggttcttggcatcatttcaaccccctagtatgcattccttattatagagcctgcaaagcgaaaatacttccagactcccttgcagctaaacttctgtaggccaattaggtttcatccattagaagcatgagaagtgggtggtggaagaaggtggaattaatcttcctgttatgctggtagaggcagctgctaagcacaattgggagacactggattttcctgcaggaatgttcctgtttccaattgtgagaacaacccgtttttgttgagagtccattgcagtaacaatgatgactgcctccgtatctctgaattgcaactttcctggtgttttcattgttttgttgttcctgttgctgttgttgttgttgttgtttttgagatagagtctcgctgtgtcacccaggctggagtgaagtgatgggatcttggctcactgcaacctccacctcccagactcaagcaatccttccacctcagtccatcccagtaaatgggactgcagttgcatgccaccacaccttgctaattttctgtattttctgtagagatggagtctctccatttgcctaggcttgtctcaaactcctgggctcaagggatccacccgcattggcctcccaaagtgctaggattacaggcgtgagtcaccacgcccagccatgctgttcctttttatggttcaataatattccattgtgtggatatcccatattttgttcattaattatggtgatgtagtcttaaagtcaaaaatccccactctaggggataattctccacctccctgctaataatagaggcagaagctcctgcttgggtgagttgggaggtgatggtttttgttttgtttttgtttttgttttgagatggagcctcgctctgttgcccaggctggagtgcagtggtacaatctcagctcactgcaacctccacctcctggattcaagcaattctcctgcttcagcctccagagtaactgggattacaggcacatgccatcacgcccagctagttttttgtatttttagtagagacagggtttcactatgttggccaggctggtcttgaactcctgacctcaagtgatgtgccttccttggcctcccaaagggataggattacaggggtgagccattgctcccagccgggaggtggtgttttgtagcaagtcattctatcggctttccctagatccctattctccagccttggttctgtaagcaccaagttccctggttttggttctcatttcctgcaactaaaccgtgattgatatgtgcttggaagattcattccctttatctgtctgaagagaacctcataattcacgaagccccaatactccaagctattcatgacctacctactcagtactccctcctggaccatgctggaaacatctctttaacaggaaccttcctgactcactgagctccagtgaagcacccaccactgggatacatcctctccatacattaattccttgagttcttacaacaaccctgtagggtaggcactgttatcccccatttaaaaatgcaggccaggtgcagcagctcatacctataatcccagcactttgggaggcagaggactgcagatcacttgagcccaggagtttgagaccagcctggcaacatggcaaaaccccatctctacaacaaatacaaaaagtagctaggcatggtggcttgcgcctgtagtactagctacttggaaggctgaggagggaagatcgtttgagcccaggaggtcgaggctgcagtgagctgcaattgcaccactgccctccagcctgggtgacagagcgagaccctgtctctaataaataaataaatgaaaactttgaggctcagagaggttaagtaatttgcccgaggtcacccagctataaagggcagacacaggattcagactcagttccatctgactcaaagccaacctattgaccgggtgcagtggctggcacctgtattcccagcactttaggagaccaaggtgggaggatcacttgagcccaggagttctaggctgcagtgacctgtgatggtgccactgtactccagcctgggtgacagagtaagaccttgtctcttttctttttttcaaaaaaagaaaaaaaaaaaggaagtagttggggtctcgcccaggtaattctttttttttttgggggggagatggagtcttgctcagtcgcccaggctggagtgcagtggcgcgatctcggttcactgcaagctctgcctcctgggttcacaccattctcctgcctcagcctcccgagtagctgggactaccggcacctgccaccacgcccagctaatttttttgtatttttagtagagacagggtttcaccatgttagccaggatggtctcgatctcctgacctcgtgatccacccaccttggcctcccaaagtgctgggattacaggcatgagccactatgcccaacctcacccaggtaattcttttaattaatgagagcccatctctactaaaaataaaaaattatctgagcatggtgccttgtgcctgtagtctcacctactctggaagctgaagcaggagaattgcttgagcctgagagattgaggcttcagtgagctgattgcaccactggactccagcctgggcaacagagtgagaccttgtctcaaaaaagaaagaaagaaaggggccaggcactgtggttcacaactgcaatcccagcactttgggaggccacggtgggtggattacttgaggtcagaagtttgagactagccgggccaacatgatgaaaccccgtctctactaaaaatacaaaaattagcctggcatggtggcgcatgcctgtaatcccagctactcgggaggctgaggcaggagaattgcttgaaaccgagagatggaggttgcagtaagctgagatcactgcactccagcctgggtgacagaataagacgaaagagagaaagagagagggaaagaaagaaagagagagagagagagagagaaagaaagaaagaaagaaagaaagaaagaaagaaagaaagaaagaaagaaagaagaaagcaagaaggaaggaaggaaggaaagaaagcagcagaaaaagaggaaggaagggaggaaggaaagaaggaaggaaggaagggagggagggagggaaggaaggaaggaaggaaggaaggaaagagagagagagaaagaaaatagacacacacacaactccacaaaacccacaattcagacacacagctcacacacaggtctccagcatagacatatttatacatccgtttactcaaacactcacaatacaatcacataaaacaggcagacagttcacatgccaacacactcttgcacagacacgcaaacagaagcatggaatttgtacagagcacgctcacagtgtctgatccataactcagacacggagtcacgcccacaaaggcacagtagaggcagagttcacacacaaacagacccgcggggacccacgacacagccctctgacacgaggacgccaggccagggcagcgtgggaatgaggctgcaaggagggagtgaggtggagaggatgactcaggaggcctctctgggggaggaggagggaagggggaggagggcaggcatccagcgcatgtggttcctattaggggcctgggaattgaggcatgagctggcgggacaaggagacccaggaacgcttcccagccttaccaaagcaggaaggagcagggccctgatctaaggccatgcggccggaacttggctcagaaccacagccgttctaaggcagagtggtctgccccaagccaggcccagcagggggctcatttcaacccctgcgatagtcctggagaagatttctttttattttttcttctttctttctttcttttttttttttttctgagacagagtttcgctcttgttgcccaggctgcagtgcaatggcgcgatctcagctcactggaacctccacctcccaggttcaagcgattctcctgcctcagctacccgagtagctgggattacaggctcctgccacatgcctggctaatttttgtatttttagtagagacagggtttcaccatgttggtcaggctggtcttcaactcctgacctcaggtgatacgcctgcctcggcctcccaaagtgctggaattacaggcatgagccaccaagctgggcccctttctttctttttttgagacagggcctcactctgtcacccaggctggagtgtggtagcacaatcacagctcattgtagcctcgacctccccaggctcaggtgatcctcctacctcagcctcccaggtagctggtactacaggtgcacaccgccaccatgcccagctaattgtattttttatagagatggggtttcaccatgttgcccaggctgttctggtcttgaactcctgggctcaagtgatcaactcgccttggtctcccaaagggttgggattacaggcatgagccacccggcctggacttttttcttttttttttttttttgagacagggtcttgctctgtcgcccaggctggagtacagtggtgcaatcatggctcactgcagcctcgacatcctggcctcaggcaatcctccttggagggtttcgtaggggaggaaagtgacattcagaaaggtgaagcaacttgcctgaggtcacacagcaaggaggtagaggagctaggattcaagcccttgtctctgtgcagcctcctctccccaccttgtagtagaggccaggacccctccatttaagctacaagcagagatcaagaactgacacctggaccaggctgcactggatttgtggctctgaaacagccagctctggccaggcgcggtggctcttgcaagtaatcccagcactttgggaggccaaggcagatggatcacttgaggccaggaatttgagaccagcctgaccaatatgatgaaaccctgtctttactaaaaataccaaaaattagtcaagcgtggtggtgtgtgcctgtagtcccagctactggggagactgaggcaggagaatcacttgaatccaggaggcggaggttggtgggccgagatcacgctactgcactccagcctggggagcagagtgaggctctgtctcaaaaaaaaaaagaaaaaaaaagggaaagaaaaagccagccccatcctcaaataacttagagtcaagagcgtgctgtgtgcacatgtgggcaaggttctctgggcgtgtatgggaggccctgacgtagcctgggttgtttgccatgaggggcggatgctggagatgaaacctgaaggatgcagaggagctagcagggctcggtgggcagcaagaagaccctggggctgcaaggttcagagagttaggtcacctggtgagggacagtgacaggggaagcccaagattctaggtcagaggacttgggctttatcttagggttaacagggaagcctcagaagaatggtgagaggaaagggacagggtgaagtctgagtgaccagcacgaagtccacacccaggacagctgaacatgtgcctcccccataacccagaatttctattcttagcaatctatacaccctagagacacttatctatgtgcacaaaagacacacgctgtggccgggtgcagtggctcatgcctgcaatcccagcactttgggaggccaaggcgggaggatgggttgagcccaagagttccagaccagcctgggcaacagggcaagacctcctctctataaaataataataataataataataataataataataataataataaaactacctggtcatggtgatttgcgccttctatttgggaggatgaggtgggagaatcacttgagcccaggagttgaaggctgcagtgagctatcattgcaccgctgcaccccagcctgggcaagagcaagaccctgtctcttaaaaaaaaaaaagacacatggctgggccgggtgcagtggcccatgcctgtaaccccagcactttgggaggccaaggtgggtggatcacaaggtcaggagtttgagaccagcctggccaacatggtgaaacccccgtctctactaaaaatacaaaaattagcagggcgtggtggtgcgcacctgtagtcctagctactcaggaggctgaggcaggagaatcgcttgaacccgcaaggcggaggttgcagtgagccgagatcaggccactgcattccagcctgggtgacagacggacaatctgtcccaaaaaaaaaaaaaaaagacacatggccaggcacagtggctcttgcctgtaatcccagcactttgggaggccaaggtgggtggatcacgaggtcaggagatcgataccatcctggctaacacggtgaaaccccatctctactaaaaatagaaaaaattagctgggcatggtggcgggcgcctgtagtcccagctactcaggaggctgaggcaagagaatggcgtgaacccgggaggcggagcttgcagtcagccgagatagcgccactgcactccagcctgggtgaaagagcgagactctgtctaaaaaaaaaaaaaaaaaaaaaaagacgcatgccagaatgtttaaacagaaacaaaatgggaaaaacctaagagttcatgcatagaatgagtaactatgcagaggtaaggtcacacgttaccactgcactttagcatgggcaagagaacaataccctgtctcagagagagagggagagagagagagagagagagagagagagagagagagatacttgtatctacaaggacaggcaaaacctccagttgagctaacaaagcaagttgcaaaagaacatgttcaaccttgaaccagttagagatcatttaaaaatctgccaaatcatgtgtgtcatccatggatacagcagtccatatgcagtacatttggaaaagcattctgggaacagccattcccacactcagaggggtgggataatggggaaagagtgtttcatggggacagtagttcagtctgggaagatgagaacattctggagatgagtggtgatgatggttgcacagtaatgcgatcgtactcaagccactggactatacacttgaaactagttacaatggaaaacgttatgttatatacatatatatatatatttttatttatttatttatttatttatttgagacgttgtctgcctttgtcaccaggctggagtgtagtggcaccatctcagctcactacaacctccgcctcccgggttcaagcaattcttctgcctcagcctcctgagtagctgggactacaggtgcacaccaccacacccacctaatttttgtttttttagtagagacggggtttcaccgtgttggccaggatggtctcaatctcttgacctcatgatctgtccacctcggcctcccaacgtgttgggcatgagccaccgcgcccagccctatgttatgcatattttacatacacatttggatacagttggtgagggaaagaaagagatgcagtcggataaatgtatacaaggggcatcaattatgtgcaaagcgttatttctcaggtgggtgtgtgagtaggtgagagttcatgataagagttctctctattattttctatttatgtattaattaattaacttttttttgagacggagtctcactctgtcacccagcgtggagtgcattggcatgatctcagctcactgcagcctccgcctcctgggttcaagcgattctcctgcctcagcctcctgagtagctgggattgcaggtgcacaccaccatgcccaactaatttttgtatttttagtagagacggggtttcaccatgttggccaagctggtctcgaactcctgacctcagatgatctggcctccttgacttcccaaagtgctgggattacaggcgtgagccaccatgcctggctggttattataaatagtgctgctatgcacatgggtgtacaaatatgtctttgagctttcgctctcaattcttttgctatatacccagaagtgggattgctctgcctggtacatttcttgttaaaattttgttttcattgaggcatatattatacacaataaaattcactaatctctatttttttttttttttttttagacagggtctcattctatcatccaggctggaacgcagtggcccagtcatggctcactgcagccttgacctcctgggctcaagtgatactgttgcctcagccgccctagaagctgggactacaggcacatgccattacacctggctaaagttttaagtttttgtagaaacagggtctcactatgttgccagggctaatcttgaactcctggcctcaagcgatcctcccaccttggcctcccaaagcgctaggattacaaacttgagccaccacccctggactcccctagcttttcttcatagcaccacttgatattatatatatacatatatatacacacatatatgtgtgtgtatatatacatatatgtgtgtgtgtgtgtgtgtatatgtgtgtgtgtgtatgtgtgtgtgtgtatatatatatgtatatatttgcttactgcctgtcaaccatcctaaagtgttaactccagcagggcaaggatctttgtttgtttcatggctgtctccccagagcctacgccattgcactctagtgcctggagcatagtaggtgctgaacaaatatttgttgaatgttatatgtgctgggatggggcctctgatatgtctacaagccagttttttggggtttttgttgtcgttgttgtcgtttttgagatggagtctcgctctgttgcccaggctggagtgtagtggtgcgacctcggctcactgcaacctccacctcccgggttcaaacgattctcctgcctcagcctcccgagtagctgggattacaggtgtgcaccaccatgcctcactaatttttgtatttttagtagagatggggtttcagcatgtccaccaggctggtcttgaactcctgacctcaggtgatctgccggcctcagcctcccaaagtgctgggattacaggcatgaaccaccatgactggcctacaagccagtttaaccaggctcttgtatgtagcttcatgtgtcaatggcatgtcttcatgtgaggctgcagttttccaggtctaacatgtgccagccaggtctcatgatgcagtagttttgtgtatgacaatgacagtctctctctccaggtgtggctctgtctctgcaaatggatttctgaacaccaatgtgtgtgtgtgaagggagctctgggtgtgtgttgtaaaccaataagtaggccgggtgcggtggctcacgcctgtaatcccagcactttgcaaggccgaggagggcggatccgaggtcaggagatagagaccgtcctggctaacacagtgaaactctgtctctactaaaaatacaaaaaattggcagggcgcggtggcgagcacctgtagtcccagctactcaggaggctgaggcaggaaaatggcgtgaacacgggaggcggagcttgcagtgagtcgagatggcaccgctgcactccagcctgggcgacagagcgagactctgtctcaataaataaataaataaataaataaataaataaataaaccaataagtaacagaggcagatctcaatcaatttagaggttgattttgccaaggttaaggacactcctgggaaaaagaaacacaagttacagtaggatctgccgcctgtgctttgtccaaagagagtttttaggacttcactatttaaaggggactgggtgtagtggttcatgcctgcaatcccagtgctctaggaggccgaagtgggaggatcacttgagcccgggagttcgaggctgcagtgagctgtgatggcaccattgcacttcagcctgggcaacacaacgagaccctatctccaaaaagaaattcttttaagaaaaaaaattagagtgggcacaatggctcatacctgtaatcccacactttgggaggtcaaggcgggcagatcacttgaggccaggagttcaagaccagcctggccaacatggtgaaaccccatctctactaaaaatacaaaaaattagccgaatgtggcagcatgtgcctgtaatcccagctacttgggaggctcaggtatgagaatcgcttgaactcgagaggcagaggttgcaatgaaccgagatcacatcattgcactccagcctgggtgacaaagcaagactccatctcaaagaagagaaaaaaattaaaacaaatttaaggggaaaaagcaaaaaggaggggaaggaggaagggaaaaataggggagagagtaggcaatgaggcaagtggtttcattcatgtgaggctttgattaccgcttagtgaatctgcattttacatgtgaaaagagaggggtagattatgcaatcggctccagctcagtaaatctacattttacgtaagacagagtaagcaagtgaaattacagctatctccttcggaacaaaaggaaagcagttttcgcctgactcagttcccaagcttcacttttcccttttgccacagttgagtttggagccccaagttgcaattttcctttcacagctgggagtgtgtgactgtgtgtgtgccctgctattggtgccagtgtgtctgaacctggctgaggatgtgggtgtgtgtacgggagtttggaacatgacctgcagccgtggcaggggtgacaagagaaaagcctgactttgagggtccttggttctgatatataattgtgtgtgagtgtccccatcaaagttgtggccgggcacggtggctcatgcctgtaatcccagcactttgagaggtcaaggcaggcggatcgcctgaggtcaggagtttgagactagcctcgccaacattgccaaaccccgtctctaataaaaatttaaaaaaaaaaaaaaaaaagctaggaatggtggcacacacctgtagtcccagctactcaggaggctgagtcagaggaattgcttgaacctgggaggcggaggttgcagtgagccaagattgtgccactgccactgcattccagcctgggcaacagggcaagacttcatctcaaacaaaacaaaacgaagttatgggtatgcgtgtgtaaaattccctgctaggcccggcaccctggctaacacctgtcatcccagcactttgagaggctgaggcaggagaaccgcttgagctcaggagttccagaccagcctgggcaacatagtgagcccttgtctctacaaaagatttaaaaattaggtgggtgtggtggcacgagcctgtggtcccagctactcaggaggctgagatgtgaggatctcttgagactgggatgttgaggctctactccagcccgggcaacagaacgagaccatctcaaaaacaacaacaacaacaaaagaaatagccgggcatggtggtgcgcacctgtagtcccagctatgagggaggctgaggcaggaggattgcttaaagccaggaatttgaggctgcagtgagctatgatcaagccactgaacttcagcttgggtgacagcacaggaccctgtctctaaaaaaataaattaaaaaccattagtgaggagaggtgggatgcacctgtggtcccagctactctggaggctgaggcaggaggatcacttgagcaggggaggtggaagctacagtgagccatgatcacaccactgcactccagcctggtgacagagcaagaccccaactcctaaacaaataaactcccctaccatatccgccccgcgcctgaccacagccatctctgtataaagccacaggcggcccccactctggccaccccactccacccctggctggaacactgggtgtcagtaattgctcagggagcactagcagtgtgattaattatggctgctaaatatgtaaatcagctgggggttttccgggcagccgcctgggtgctggcactaatgttgaataaacacaaggagcttagcaaggcccagaattcccttctcacacctttgtcaattaacgtttcatttatggggttgggtttctcattcattaacgagctttgggctcattaaagagtcctcattaaactctataaatcgtccctcctttccaaaacgcctgcactgggatgggaatggagttgcaaaaccgagacaggccgacctgcattcaaacgcctggctgtgtactgtgggcagacgcctcccctctctgaacctgtttccttcctgtaaaatgcaagcaaacagacatgggggcatgggggcaagcgccctgtggctcatgcctataatctcaacactttgggaggccaaggcgggaggatcgcctgaggacaggagtttgagaccagcctgggcaacatagcaagaccctttctctacaaaaaaaatttgaaaattagctgagcatggtgaagcgcacctgtagtcccagctactcaggaggtggaggcaagagggttggttgagcccaggtgttggaggctgcagtgagctatgatcgtgtgactgcactccagcctgggcaacagagcaagatcctgtttcaaaaaaataaaaggctggggtcaggagttcaagaccagcctggtcaacatagtgaaagccctgtctctactaaagatgcaaaaattagctgggtgtgatggcacgtgcctgtagtcccagttgctcaggaggctgagacaggagaattgcttgaacccaggaggcaaaggctgcagtgagctgagatcatgctactgtactccagcctggtcaacagagcaagactctgtctcaaaaaataaagaaatacaataaataaaataaaataaaagaaataggccgagcacggtggctcacacctgtaatcccagcactttgggaggctgaggcaagtggatcacctgaggtcaggagttcgagacctgcctgaccaacatggtgaaacccccgtctctactaaaaatacaaaaattagttgggcatggtggcacacgcccataatcccaggtacacgggagcctgaggcaggagaatcgcttgatctcaggaggcagaatttgcagtgagctgagctcacgccattgctctcaagcctgggtgacagagcgaaactccttctcaaaaataaataaataaataaataataataattaaaataaaataaatataaataaaaagaaagggagatattaaagtggactgtgataattaagaaagagaatacatgtaaagtgctgagcccaggggtgtaattttgaaaaacggcaacagccaaaattcccttaagagagagaatggctttttgtttagcaaaatgtttgtgttttttgtttttcgtttttaagagatgggatcttggtatgttgcccatgttgacttgaagtcctgggctcaaactcactccagatctcccaccttaggctcctaaatagcttgagctacaggtgcatgtcaccatgcccagctctgtttagcaaaatctgttgatgatcttcatcactttcttctttttttttttttttttgacggagtctcgctctgtcgcccaggctgcagtgcagtggtgcaatctcagctcactgcaagctccacctcccgggttcacgccattctcctgtctcagcctcccgagtagctgggactacaggcgcccgccaccacgccctgctaatttttcatatttttagtagagacggggtttcactgggttagccaggatggtctcgatctcctgacctcatgatccacccaccttggcctcccaaagtgctgggattacaggcgtgagccaccgcgtctggccgatggtcttcatcactttctagttctagactttggataaattattccacctctctctgttcctcagtttctttatctgcaccacagagataataatagaacatccctcaaaggttgttatgtgggataattaaattaatcgaggtaaaacatttgatgaacagtgtctggcatatgagtaataaatggcaactatgattaagattaatagtgttagttgaggctgggcatggtgtctcacgcctgtaatcccagcactttgggaagctgaggctgaatgatcccttgagcccaggagcttgagaccagcctgggcaacacagtgagaccttgtcttttttttttttttttgagacagagtctcgctctgtcacccaggttggagtgcagtggcacaatctcggctcactgcaacctccacctccctggttcaagcaattctcatagctcagcctccacagcagctgggactacaggcacatgccaccatgcccagctaatttttgtatttttagtagagacggggtttcaccatattggccaggctggtctcaaactcctgacctcatgatccacccgccttggcctcccaaagtgctgggattacaggtgtgagccactgtgcccagccgagaccctgtctctctgtttttttttttttaattatactttaagttctagggtacatgtgcacaacgtgcaggtttgttacataggtatacatgtgccatgttggtgtgctgcacccattaactcatttacattaggtatatctcctaatgctatccctcccccctccccccagaccctgtctctttaaaaaagtttaaaaattggctgggcgcggtggctcatgcctgtaatcccagcatttaggaggccaagatgtgtggatcatgaagtcaggagatcaagaccatcctggacaacatggtgaaaccccgtctctagtaaaatacaaaaaaaaaaattagccaggcatgatggcgcacacctatagtcccagctactagggaggctgaggcagggtagttgcttggaaccaggaggcagaggttgcaacgagccgagatcacgccactgcactccagcctggcgacagagcaagactctgtcaaaaaaaaaaaaaaagtttaaaaattagctgggcgtggtggcacatgaatatagtcccagctacttgagaggctgaggtgggaggatcacttgagtccaggagttggagactgcagtgagctatgattgcaccactgcactccagcctgggcaacagcaagaaaaaaaaatgcttctaaaaaaacatgaatgaacgaatcatcaacctctgggcaccaacagtcttcatggagtcaggactcttagcaacgttgattcaatgaatgaggacaagtattcaggtggccttaaggggctggtggcaggagtagtagggtgagagccttgggtttgagggagaaaactcaccccaacctgaagtttctacccacccaatcccatctgacccaactcaactcacaccatttctccatcactcctaactaaactcaatccaacagtgcccatcaacgatgaatgaattagctgaaggtgggagatgactgaatattacttggcaataaaaaggaatgaagtactgatgcatgctgcaaataaacctggaaaccagccaggcactgtggttaatgtctgtaatctcagcactttgggagatcgaggtgggtgaatcacttgaggccaggggttcgagaccagcctggccgacatggtgaaactccgtttctactaaaaatacaaaaattagccagggatggtggtgcgtgcctgtagtcccagctactcgcgaggctgagaaaggagaattgcttgaaccctggagggggaggttgcagtgagccgagattgtgctactgcactccagcctgggtgacagagcgagactctgcccacaaaacaaaaaactcctggaaaccgttttgctgaaaatgccagatacaaagggccatatatcattatatcatttatttgtatttattccttttttttttttttttttagagacaaggtctcactctgtttcccaggctggagtgcagtggtgagatcacagctcactgcagcctccaactcctggcctccagtgattctcccgcctcagcctcttgggtagctgggactacagatatgcaccactgtacctggctaatgtttttattttcatttttgtagagatggggtcttgctatgttgcctaggctggtctggaactcctggcctcaagcgatcctcctgccttggcctcccaaaatgctggggttgcaggagtgagccacctcacctagcgtgattccatttatatgaaatggatatttctgtccagaataggcaaatccttagagacagaaagcagattcgtggttgcctacagctgggaggttggaaagacatgagtgaccactaatgggtataggatttcttttaattacacagcttaaatgggtgaattatatggtaatgaatggtaatgaattatatggtaatgggtaaatgaattctatctcaataaatcagttaaaaatatacctcaaaccaacatcttactcctaattcaaatcatcccaaaccaaatttttttttttttttgagacaagttcttgctgtggtgtcacccaggctggagcacagtggtgcaatctcagcttactgcaacctccgcctcccaggctcaagtcattctcccacctcagcctcctgagtagctgaaaccacaggcatgctcctccatgcctagctaattaaaaaaaatttttttgtaaagaggccaaacttctggtttaagctgacttgggcctcccagcccaagctgacaattttcaacttttcctctaggagcctgggtgaataaataggcctataatctccagtgagtctcattataattgcattcccaaaagacatacctaattaatacaggtggtgacaggtacctcagatgagacaagagccagatcccaagacagatatgggccacatcagatgaaagagatcaagagctgggtgaggtggctcgtacctgtaatctcagcagctcaggaggctgaggtgggaggattgcttgaggctagtagtttgagacaagcctgggcaacaaagaaagacaccatctgtacacaaacacacacacacacacacacacacaaaacaacccagctgggtgtgatggtgcatgcctgtggtcccaggtactcaggaggctgaagaaggaggatcactcgagtcccagagttggaggctgcagtgagccatgatcatgcccttgcactccagactgggcgacagagtgagacccagtctctaaaaacgagcaaacaagggctgagcgtggtggctcacatctgtaatcccagcactttgggagatcaaggcgggcggatcacctgaagtcaggagttcaagaccagcctggccaacaaggtgaaatcccatctctactaaaattataaaaattagccgggtgtggtggtgcatatctgcaaccccagcttctagggaggctgaggcaggagaattgtttgaacccgggaggcggaggttgcagtgagccaagcttgcaccactgcactccagcctgggcgacagagcaagactgcgtctcaaggataaataaataaaacaaacaaacaaacaaaaaaatttaaaaaagaaatacacagagacagaaacacagttcatcagtttattctcagatttgagatgcaaattatgccctatggcctggcggtggggggccaggcttgggctggaatctctcatcatatcccagccttccctaaggaggaagcagatgaaatctacaacaggggggactttcccttttaatacagacccaggtataaatagggcagcaccattaggatcctgattcacccccccaacatcttggtccccaaaccacctggcatggcaaggtgagcctggggaggtggggggcagggggaggggatttgcagagctgggctgaggcaggaaaagaaacacaacccagtcaagggaagtccctcttccctctgtagtccgacctcagtcctttcaccgtggaagtagaaaggatcaaagggggtgggggtaggggtcccagcctgggatcaggagacatccagtgcttaactctggggaggggtagcaccaaaaggtgtgaagggcagcgacggaggagtgaggaggcaggcattgggggtgggggggcttttgttcatcagctctgagttagaagctcattgcatgggggttcaaggggtggggaggtgaggcttgggtggggagggaggggagaaagagccagactgcagtatgccacctggaatggggtgagaggaggctggacccttgggccagggaaccccagcccccagcaccctggaaaggagaaggaatgactgtccgtgatgagcgaagtcacatcccattggctccatagtcacaggtaacgaaaaatacggtggcttcaaagcctcagcaccaaatgcaccccattctggggctccctcatggtccctcccaccccggacactctcagctgctgaagcagacggggcccagttcaaacccaaacttttggttcgtctggccaaagtcagtggccgccacatcccacaggggcagaaatcccgctcgagaagagctgaattcgaaaagggtcttcgtctgtcctttccggagctgtccccagagaagacagagacggtgagttaccgggaaggtggccgacatcttgcctcccctctctagctggccactgccccaccctcttacccggcagccatcctgggggacgctgacagtggctgctgtcgtctggttgaaagacagctcctctccattggtgccaaggaagcgggcggagtggctgtagtcacccgtggcttcgtccagccaggcagctgcattctggcaggagtaggtgaagttctggcgagctgtggcactcagcagtttcaggaagttcagctgcacgacattcactggggacccgtcggcgtccacgtaggagaactggtgagaggagggcaaggcagaggatgaggggctccatgagcctctttctgcagaagccaccccctggaatctccatccactggcagacaagccaccccccccatgtcaccatctctgaggaggtcccaccagccacctagagatccctggcagaatcccaagagtcacctgaacatccactctgtccacctctccatccagtaggcctccatgcccactccatctgacctcccaaattctgattgcttcatccaccaatccagggttttaacacactcatccccacccagaagacacaactctgcctccactcttgtgagtcgctggatctacagagctcactgtccctgataccagatttctgccctgtccaatatggcagccacatgtctaatagccacgtggcttttgagcacttgaaatgtggctgatttgaaggagggatttttttttactttatttaattttttttccttttttggggggtaagggttgggatcttgctctttcgcgcaagttggggtgcactggcacaatcctggctcattccagcctccatctcctgagctcaagtcatcctcccatctcagcctcccaagtagctgggactataggtgcacaccaccatgcctggctgggactttttttttttttaacttcatttaatttttttttttttttttgagacggagtcttgctctgtcgcccaggctggagtgcagtggcatggtctcagctcactgcaagctccgcctcccgggttcacgcctttctcctgcctcagcctcccaagtaactgggactacgggcgcctgccaccacgcccggctaattttttgtatttttagtagagacggggtttcaccatgttagccaggatggtctcgatctcctgacctcgtgatccgcccaccttggcctcccaaagtgctgggattacaggcgtgagccactgtgcctggccctgaattcttttacttaaaaaaattcacaactaatgactgagcttcaatccagttatcagaaagcttatgcttggaacaacttgagtctgaatctactttttgaactgttgttcaatggttttatgaaatctaaatatagagcaaatattcccaataaaatttagcattcaaattgtgatgtactataaatgtaaaatctccatcagattttgaagagctaatctgaaaaaaatacaaaatatcttaataatgctttttttttttttgagacggaatctcgctctgttgcccaggctggagtgcagtggcacggttttggctcactgcaacctcttcctccagggctcaagtgattttcctgcctcagcctcctgagtagctgggattacaggcacacatcaccatgtctggctaattttttgtatttttagcagagatggggttttacaatgttggccaggctggtcttgaactcctgacctcaggtgatccgcctaccttggcctcccaaagtgctggaattacaggccactgtacccagccatgtggctttttcttcttcaaattcaccagaccctgtcttgactgagcctttgcatatgcctttccctctccctggaacacttgtccttgtccttcctagcttgctaacacagtgcattctttaggcttcagatgagctgtgatctctactaggaagccttctggtctttccaacactgcctctaaatttccaccatgccctgtgcttcccctatcctggcaccatcattctgtatggcaattgactgcctgttacacatctgatgctgctgccaccccacctccagcttgcgatccctaggaaggtagaggaaagcctatcctcttcatctcacctctcagaacccacccctcaaacccccctgctggttcccatcaattttcatgtcactccccatctcggcctcggtgactcaccttcttccctcgacggaatgtgctataccagcctccaggcttttccttggaccaggaggccaatttcacctggaagagaaaagggagggtcactgtagctgacgcccttggtgccatctagatctcatctgcatttccctcctcacacagtaggctgttgtgactatgtcaggatgttctctggcttctgggatggacgagctctgccagtgcacaatgggggaaggaggttcatgcccctgaggcagccctcacccaatgactaatgggagttggtggataaataccccagctccctcacctccaagggggataactctcaggtgcctgtgctacacagtctcccagggctccccagtgggattgagctctgggtctccaatggcaccattttattttaattaattaattaattaatttttgagacaggatctcactctgtcacccaggctgaagtgcagtgacataatcatagttcactgcagcctcaaactcctgggctcaagcaatcctcccactgcagcctcccaagtagctagaactacaggcatgtacccccatgcccagcttttttaaatttttattttttgagacagagtcttgttctgtcacagggtcttggagtgcagtggtgtgatcactggctcactgcagcctcgacttccaaagttcaagcaatcctctgacctcagcctcctaagtagctgggataataggagtgtgccaccatgcctgttttttttgggggggggggcgggtggagggggtctttctatgttgcccaggctggtcttgaactcctgggctcaagcgatcctcccacctcagcctcagcctcccaaagtgctgggattacaggtatgagccactgtgcccagcctcagcctctccctttaggctaagcaggtgagtgaagaggaggtcctcagatgttagtaattgtttagggatcaagtcttgcactccgggcccagtgggaagtccaagcttgtctaaattcccatccactgggcatctgagctcccactaaaccaggagaaaataaaccagttaaaaataacaacatggggccaggcgcggtggctcaaacctgtaatctcagcactttgggaggccgagatgggtggatcactcgaggccatgagtttgagaccagcctggccaacatggtgaaaccccgtctctgctaaaaatacaatacaaaatgagccaggtgtggtgacaggcacctgtaatctcagctactcgggaggctaaggcaggagaattgcttgaactggggaggtggaagttgcagtgaaccaagatcacgccactgcactccagcctgggcaacagagtgagactatgtctcaaaagaacaaaacaatatggggctgggcacagtggctttctcccactgcttaatcccagtgctttaggttacagtgagctatgatgatgccactgcactccagcctgggtgatagagaaagaccctgtctataaaaattagaatagaccgggtgtggtggtttatgcctataatcacaataccttgggaggccaatgcaggaggatctcttgaggccaggagttcaagaccagcctgggcaacatagtgagaccctcatctctataagaaatttaaaaaattagccaggcatggtgatgcacacctgtgtgatgcacagctactcaagaggctgagacaggaggatcattgaacccaggaggttaaggctgcagtgagctgtgatcccaccactgtgctctagcctgggtgacagagtgagaccctgtctgaaaaacagacaaaaataacaataacaataaatattatttcacacttataccggccaggttcttgctaagtgctttacctgcagatagaggtattagcccagcactacatgtagtcagggtttagtaaatgttccctgcaggccaggtgcggtggctcatgcctgtaatcccagcactttgggaggccaaggtgggcagatcacctgaggtcaagaccagcctaaccaacgtagtgaaaccccatctctactaaaaaaaaaaaaaaaaaaaaaaaaaaaaaaaaaaaaaaaaaaaaatcagctgggcatggtggcgcatgcctgtaattacagctcctggggaggctgaggcaggagaaacacttgaacctgggaggcagaggttgcagtgagctgagatcacgccactgcattccaggctgggagacagagacagactctgtctcacacacacacaaaaacaaaacagttcactgatatttgtttttgcatcagtatctgaattgcacagccactctatgaagtagatactttctttttttcttttctttttcttttttttttttttttgagatggagtctcgctctgtcgcccaggctgaagttcagtgacacgatctcggctcactgcaagctccgccttctgggttcacgccatcctcctgcctcagcctcccgagtagctgggactacaggcgcctgccaccatgcctggctaattttttgcatttttttagtagagacagggtttcaccatgttagctaggatggtctcgatctcctgaccttgtgatccacccgcctcggcctcccaaagtgctgggattacaggagtgagccaccgcgcccggccttcttttttttttttctaggcggagtctcactctgtcacccaggctggagtgccatggtgcaatcttggctcattgcaacctccgtctcccaagttcaagtgattctgctgcttcagcccccgagtagctgggattacaggcgcccgccatcacgctcagctgatttttttatttttagtagagacggggtttcaccatgttggtcagccttgtctcgaactcctgacctcaggtgatctgcccccgcttggcctcccaaagtgctgggattacaggcgtgagctaccacatccagcctattgatttcttttggagttttccttgtctgtcttcccatggaaggtatgagttccataaaagcagagatagtttgttttctttcctttcttttttctgagaaggagacttgctctgtctcccaggctggagtgcagtggcacaatctcggctcacactaacctctgcctctagggctcaaaggatcctcccgcctcagtctccagagtagctgggactacaggctcgcaccaccatgcccgccagttttttaattcttgtagaaatggggttttgctatgttgctcaggctggtctcgaactcctgacctcaagcgatcctcccgcctcagcctcccaaaatgctgagattataggcatgtgccaccaggctggcctgattttttttctttttgatcctctgctgtagtcccagctcttgaggcaggacttggcatacagtaagtgctcaataaatgccggttgaaggaaggataacgtcccagacaaggtggttgtgggtgtggggagcaggggacagcacttcctgggggaggcgatgagaggtttgggttactcacgatctcaaacttcttgtcgggatagaggcaggtctctcctcccgccgtgaagttgcaaaaaaccctgaacgagtcccgcgcgcagccctggttggggtcaatccagtattcccctgccgcagagccaggcagggtgggtgagtccggatgggacccgacggaccccaaccccccccacacccccactccgcccatccaagtggcggggggaccggacctcaccatcaggcaggtgcgggtggttgcggtgcagctcgtggcacacgaggcccgggcgctccgcagtgccgggaggacgccgcagctgctccagctccaagctcagcgatgtgagcgaggccagcacctcctccaggccgccctccacgactggaagcgggactgggacgaagcgccggcgcctgcgcagcccatgcagctcggcaggggcaccctgggcgtaggggatggggacggagaagagaggggagatgggggagggagagagagggagaaagagagacaggcagagatgaagaggcagacagacacaaatgagaaagaggagggagagagataaacaaggggcagagatagagaaaggagagataagcagacagggagagacacacaggaaagagagagacagattcagagatggggagaagccaagttgtaagaggacaaaagagaaagcgcaagaatagcagagacagggagagagagcagggagagagacagaagatgaaatagtggcgccagtatagacagagacagataagggagatggacagagacagggagggagagatggggtccaagagacaagacccaggtcagagcccccatgggtgtccccccaagtcccccctcccaggccagaccttccttggggttttacagggaactaccctcttcacctacatcctctgaacacctagtgtgtgcctggcccagtgctgcgcacggaaggaccctctggggacacccagacatagtccttgctctccccccaggttttggtgtccattcccccgccccccggggaactcaccggggggcctggtgggcctgcaggtccagtgtctccacgggggcccatggacccctgtagggagaagtcacttggagaatgaaccctgtctatggagacccttcccaccaacatacacacaaacacacacacacactcacacacacactcacacacacacagtctcacacactcacatacacactcactcacacactcacacacacacatacagccttggggaagagacatgcagttttcagcattaggcatcagacacaaattttcttttcatgttttaatgtctctgaaatcagcttcttaacatctttggcaagtcatagtttacttggcagaactgttttctttcctagcagtttgtaaaataatggtacatcttataattgatggcattttggatctgatgaaatacaaccgtaggtgttgaataaatatttgtcgaacgcacgattgcatgaataaataaataaatgaaggcagagacgtggagggttctggtgcagtgaagggggtggggagctgggatgtgtaagcccacggaagcagggtgtactcaccggagacccttttgagcctttctgtcctagagggccctgtagggtacagacagggagagctgaggtcctggcctggaccaccacagtgacctcatcccacaaaagattccctgcatactcaccgccacacctgggggcccagggtggcccagagagccaatgggaccagggggaccctaggaaaaggacatcgggtcagtattggtggggtacaccctattgccctgacacatcccccagacaagccttcaatcctaccaaaggaagaccccgaaccctagacaagcctccagttcccccacagagagaccccaaaccccagacgcagcctccaacttgccagttcccagatacatccccctattttccccacacacaccctcattaatccagacccacgtttcccagaccccacacccacagtctctcaaccgaccccctccttcaaatgcattcttcccgctcaggtcaggacactcacagggtctcccttgggaccagggggtccctgcacgcctggcaacccctgatctcctttctcaccagcttctcccggggggccaatgagaccgatcaatccaatgtggccctgaaggacaaaagaggcacagacaggggaggacgtgggaggattcagggaggtttttctcctagagccttagggtgatgagtttgggagcagaggatgcaccaatctcccagccccccagccagggagggagggaaagaggggaggagatggggaagagaataatggaatgatgtccttaccttttcccccttggggccagtgtctcccttcagccctgggaggccagagggcccctgggagaagagcaagggtcagttagggattctcaaatgtgaactcgaggtctgtgtgggtggttaggggatggtcaaatgggaaattatgcagatttcaaatgggaattaccagggatgaggtcaagggatggtcagagtaggccaccaaggtgggatgatgagagctaatgaggggttgactggaggatggacaacgtgagtggtcagtggccaaggtcagcgtgggtgatcagtgtagaccattaagatggagagtcagtgcaggcatcaagatgaagggtcagtgtggtcagtgtagaccatcaaggtggagtattagagcagagggttatagagatgggcagtgtagaccatcaaggtggaaggtcagagcagggggttatagagatgggcagtgtagatcatcaaggtggagtgttagagcagagggttatagagatgggcagtgtagaccatcagggtggaaggtcagagcagatggttagtagagacaggcagtatggacactcagatggatggtcagtgagggctagcctgcaccaatgctcactaggtggtcactaggtgcccagagtggtcctcagagccagaacctcaaggatgaacaagtctcttaccagggggccaggagggcccatctgtccaggggctcccaggaggcctggttcaccctgagaatggaacagaacatggggtgggctgcaccctgtcagaacacagtgtggacccccccccgaccatgcaccaggggcagcccctccaaacggtgatgggatcacaagctgggagcagacagagaggagctggatccaccctgtcccacccctgccccgctccactcaccacagggccagggatccctcgaagaccctcaggccccacacgtccagggggccctctagcccccattggacccgtcctccctgggggcccatcaggacctggctccccctgaaatggacacaggcaagggaggggccagagtcagagggttcctgcctcctgacccctgccaagaagcatctgggatcgggagggagtaggtgcacagagtggtcataggtccaccctctcctgatggccccactgttggcctagagtagtgcagggacccttccccttgccagggggactcaccttggcacctttctccccttctctgccttctcgacccatgtggcctgaaggacccttggaagggaaagacagtgaggggggtctaggggctgactgagggtcagaggggtgagtggggtctgggtgactggggggttatggatgagtggggtctgtaaggtgagtggggtctgtggggtgaatgaggtctgggtgagtgggggctgtgggtgagtgggggctgtggctgagtggaggctgtgggtgagtggaggctgtgggtgagtggaggctgtgggtgagtggggtctgtggggtgagtggggtctgtgggtgagtggggtctgtgggtgagtgggggctgtgggtgagtgggggctgtggggtgagtggggtctttggggtgaggtggggtgtgtggatgagtggggtctgtggttgactgaggtctgtggggtgagtggaatctgtgggtgagtggggtctgtgggtgagtgtgttctgtggctgagtggggtctgtggggtaagcgggggctgtggggtgagtggggtctgtggggtgagtgggggctgtaaggtgagtggggtctgtgggtgagtggggtctgtgggtgtgtggggtctgtggggtgagtgggggctgtggagtgagtggggtctgtgggtgtgtggggtctgtggggtgagttgagggctgtgggatgagtgaggtctgtaaggtgagtgggggctgtagataagctgaggacccaggaggtggcttatcacttaccctcttgccggggggcccgggggcgccgggctccccagaagctccaggcggaccctggaggagacaaggacaccagctgtggtctcagctaacattgtttgagcctgactgttttaggacgccttggaccagaggacacccttccccaagcctcaccccagcaccgggtactcccacctcccacctactccctcaagctgctcacattcctgggggtccccagagaggtgaagcgggagcatctgcaggggccttgggtaccccactagcccactcccctgcccccccaattcactcactcattagctccccaacccccgcctcagcaccacaccctctgttttcccactcaccggtcccccaacatcaccagggtctcccttctcccctggggaaccatctatgccctgcatggggggaagacagagttgggaggggtgatgagggtacgtgagaatttgggatggggctgggaggcaaaagaacgtttttggttccactgtcagtgcccaggtctgtgggggtagggagatggggacagaattaggaaatatgccaggattggggagggggtcacactcactgaaactccagggtctcctgggggccctagatctccgggcagccccgtggggccctggaacacagaatgattaataatcacatctctgaattgtggagcaatcatgcatttatggaacagatcaactgtatccaggaacagtttggtttctggggacacattagtgaacaaaacataaaatccctggcttggtagagcgaacattctcgtgtttcatgggtgcagacgctgagctaagaatgccgcacgcatggtctcactgcagcgtcctcacagcctctcagctcgggactcacagagaaaactggccattcatttgtctattcattcattgattcgtctattcattcattcactcattcattcattcattcatccatccatccattcattcatacactcagagaagggacacgccaaacaatgccattcaagtcgaggtcccacagatgctaaagccccttcctgacctccacccgccccaacctctactgtggtgacagaagggcctcaaccttcacctcaaagccaaatcccacatccaccccaaatctgacccaattcaaccttaatctttgcaacagtgttagaatgatctgccgtgaaatcaactttcttgccattcaatgatgtataaccactgcacgtttatgtttcattcacacatttactcactaattcaagtgttagaatgatctgccatgaaatcaactttcttgccattcaatgatgtataaccactgcacgtttatgtttcattcacacatttactcactaattcactcatccatccatccattcgtttattcactcatctcttcagtcattttgttcacttgcgcctctgtccattcattcatgcatccattcactcattcactcactcatttgtccattcggccactcattcattcatccattcattcatattcatgcatccattaatttacttattcatccattaatttactcattcatccattcattcactcatttattcgtgcacatttattcattcacatattcatatatccactgatttattcatttttccattaattcactcattcacccattcattccctcgttcatccattcattcactcgttcatccattcactcactcgttcatccattcactcatttattcatccatttattcattcacgtattcatccatccactgagttattcacttgtccattcattaattcactcattcatacattcatccactcattcattaatccatccatccacccattcattcattcatccgtgttctgggggttactcatgagatcagtaaattagaggatgcaatccctggctagaagtctgggagagttttggccgagcgcggtggctcatgcctgtaatcccagcactttgggaggctgaggcatgctgatcacgaggtcaggagatcgagaccatcctggccaacatagtgaacacccatctctactaaaaatacaaaaattagctgggtgtggtggcgcgtgcctgtagtcctggctacttgggaggctgaggcagaagaatcgcttgaacccggaagacggaggttgcagtgagctgagatcgtgccactgcactccagcctggtgacagagcaagactccatctcaaaaaaaaaaaaaagtttgggagagcttcaagtacattcaagtgccccctcccatgtctgcccccacttccccccaggactcaccacgctccctttggctccatcctctccagggggacctttcttgcctgggggtccagcagctccagatgggcctgagtcccccttttcaccaatgtctcccttgggcccctttacagaaagaggtcagaggtcagagtggcctggactctccagggatcaaggattagcatacttggattcaggcattggggtggtctgggacttttctggggtcagggttcagagtagcctaggttgtccaagggtcaaaggtcagaaggagctaggacttaagacagtgaaaggtctggatggtctaggtgcccattggtcatgtgcaaggttggcctagcccatgtgctgcccttgagtgaattagaagaggggccccatctgggcaactcatcctcaggtcaggactcatgactcagatttgagccctcacctatcccctgggtcatgtagtcttgtgtagtgtgcaacctgcagaactgtacatagcagccctatctgagaacttccaggtgtccttcctcaaggtaatcagggacggccacaggacaggggtgagtggatgatcttgcactgtccagaggtcaaagtggcccaagatgcccaggggtcaggggttccctgagttgggtgcagggaccacatcacacagtcactcaccgggatgcctggggctcctggaggccctgggtctccagcgtcccctcgctcaccctgcaggaggcaaagtgagagtggggagaggtcccatcctagcagacagggaggggctccccagaatgtccctgcccaataggactagatttatctcttccccccgtgcagcccctgccttccctcactcaccttctcacccacggcgcctggctgaccaactcctccaggcagccctggagtgccctggagagacagcaaggggtaagagtgggactgtggaatcccaacatcctcttcttaggaaatggttgtccccatctctgagccttcctggccccccaagagttctcacctctgatccagtggggccttggggaccccgaggacctggagctccatggggaccctgtggaaggtcagaattagtacccagtgaccccaggcccctctccccaaaaggccacattgaccacagataccactgtcaatgctggtgaccctcagggcccttaaaatgacaatgtccctcaaatgaatctaatgcctgccgccaacctataaccccaccatcctccccctcccaccttcctctgggagtgcataccatggacccgacgtctccgacctcccctttctctcccggagggcctggcagcccctgtggaacaaagaagcaagattggggcaccaggtagggagaatcagaagtgccacccccaaacccagacacccacctgcagtccaggagggccaatcacccccacaaagcctctgactccgtcatctcctttctgcccaaagaggcctgggggtccccggcgcccctgagccccgtctgctccctggaagaacacaaacaggggcacatttaaggtctgggtcagtgattagggcagagtgaggctcaagggtcaagactgaggttaagggttggagtcagggttcagattaagtttagagagggtcagtgttgagttggagttggggtctaggttaaggaacagggcttgggaatgaagtcaagggttgagtcaaagtgttaaacagtgagtcggatttgcagttgaggttcagttcttgggcagggttcaactggggttgagatggaatttagggttgggtttgaggttgggcccagggtcatattcaaagtttgagttcaggtctggggtcagcattggaagagttgggtcagagttggggttaaggatagggccgtatgttcctattgtatggtaataaacaaaaaaggacaggtctgggtcagggcttggttaagagatttgaagataaggcttttgtttgtttgtttgtttttgtttgtttgtttttgttttttgttttgttttgagaaggagtctcactctgtcacccaggctggagtgcagtggcgcaatctctgctcactgcaacctctgcctccctggttcaagcaattctcctgcttcagtctcctgaatagctgggattacaagtgtgtgccactgtgcctggctttttttttttttttttcttttccctcttttgagacggagtctccctctatcgcacaggctggagtgcagtggtgctatcttggctcactgcaacctctgcctcctgggttcaagcaattctcctggcacagcctcccaagtagctgggattacaggggcccgccaccatgcccagcaaattttttttttgtatttttagtagagatggggtttcaccattttggccaggctgatattgaactcctgacctcaggtgatccacccgccttggcctcccaaagtactaggattacaggcatgagccaccgcacctggctggagataaggtttgagtagaactgaggttaaggtcatgagtagagttgagactggggctgaagtgggggttcagagctgggtttaggttggaatttagtctgattttaaggttgagtgtatattggacatcgatatagaggggcagatcaaagttgagcatgaggttgagattgaaccagattctggggttgagtccatattggatgttggcattgaggggaagacatggttggagttgagattgagccaaattctgggggtgagttcatattggattttggtattgagggaaagacatggttgggttgggactgggcaggattctggagttgagttcacattgggtgctggtattgagggggaacacatggttgggttgggattgaatcagattctggggttgagttcacattgggtgtcagcattgaggggaagacatggttggattgggattgagacaaattctagggttgagttcatattgggtgtcggtattgagggaaatacatggttgggttgggattgggccagattctggggttgagttcccattgggtgttggcattgaggggaagacacggttgggtcgggattgaatcagattctgggggtgagttcatattgggtgtcggtattgaggggaagacatggttgggttgggattgaatcagattctggggttgagttcacattgggtgtcagcattgaggggaagacatggttcgactgggattgagccaaattctggggttgagttcacattgggtgttggcattgaggggaagacatagttgggttgagattgggccaaattctggggttgagttcacattggatgttggtattgagaagaagacatgattgggttggggttgactccgaatttgggattgggttcatactgggtgtttgtactgaggggaagacatggttgggttgggattgaatcagattctgagggtgagttcatattgagtgtcggtattgaggggacaacatggttgggttgggattgactccgattcttggattgagttcacattgggtgtcagtactgagggaagatcagggttgggtttgaggtttggattaagtcagtgtgcttccactgtcgtttgctcccactatccctcccttcaaggacccagagaaggactgaaaagatgggggcactcaccgggggacctgggtgtcctgcaggaccccgtatccctggttgtccaggtgggccctgggagaacaggaaacagaatcaaaaattccctcaggtttaagattagagagggcactggagctatcaatcactgcctcccacaccccctttatgagaacaacttcccctaccaggcagcaacagctacatccccccaaatcctgtcttctcagccaccaacagatgggatcagacagacgtctgtcctaagcccagccctggccacaagttccaccaagacccagggacgaagctggctcaatgatgcaagccactggagctgacattcggggtggggggaagttgggtatcagatgcttcagtgcctgccacgcagagtcacaggcagagggaaggatgtgtcactaacaatggagaaggttacccgcaccccagtgcctttccagttctttgggagccccagctgtccctatcctgtctgcagttgggttctgtggacccatcgctccaggcagctcaagtaccttctgttgcatgtaattgtcaagatggtacccgagaaggcagaaaactccatggcctctcctaccccatggagaatgatctctacatccctggcctcctctttcttccgctacccaccccaccctgccccactggggaccttcactcaccgcgtctcctttatcgcctttactccccttgtgtccgggggcacccacatccccctgcagaggaaatgggatgaaggacccagcttccattcacccccatcctcccctggacccttcctctctgtgaacccctcaccttgtccccttcctcgccagaaggcccagcagctccagggggtcccagaggccccaggggccctgggatcccatctttgccagtggggccaggggggccacgttctccctgttgtggggaatggaaagggggatgtcagggcaggaatgtcctgcaggagccatgtcctgggatgtggcagggccagaccctgaggaggccctaggaatgggatgggcaagtcacttacccgggaccccttcttgcctgcagggccaacggggccttcgctgccactttggccaggaagtccaatgcctcctgctgggcccaaaggaccgcgctcaccaggggagccctgagaacaggggtgatgaatcaggtataataccagtagtagctgtcctttatggagggtttttaagccaccaggcactgagttctgaggttaccaggattgtatctaacctgttcccctcctgcagcagccagagggtgcctgtgagcacctgaggggcagggcatattcttctcctgctcaagaacactccatggctcccatctcacttagaacaaaagccatagtcctcctggcagcctatacatatatatatatatatatatatatatatatatatatatttgtagagacaggacctggctatgttgcccaggctggtctcaaactcctgggctcaagcgattctccagcctcagcctcccaaagagctgggattataggcatgagcaactacacctggcccaagaaaaggggtttttatatgttgatggccaatgcacaggtaagtatttactggataaatgatctcaatgaggtttgtgatcatacatgagataaggcttcccatcatggctattttacagacaaggaaactgaggcttgccaaggaatacaacggcccagccagtgagcaacagaactgaccttggctcattgcaacctccacctcccaggttcaagcgattctcctgcctcagcctctagagtagctgggattacaggcatctgcctccatgcctggctaatttttgtatttttagtagagacggggttccaccatgttggccaggctgatcttgaactcctgacctcaagtgatctgcctgcctcagcctccatcatgggttttatcatgacaatgtcaagcttccaagacaccttgagtcccctccaccctgcccccacccagcacatggggttatacttacattggcccccacgggccctggggggcccttatcaccctttaagccagtaggtccctgaaggaggagataattcacagttaagagactcccaaaggtgtccccaggtcctgtcttcctctgtggggagctcacagtccccacctctctcctgggactggacactgagctttgaggggtctgccttccccagttccctccaccattttttttgctttcatcatttcccgcaccccaaatgctattccccatccctcccctgacccccccatcctttccttctctaagggacatgcaggagggtctccaaagatactcaccgggtccccagggccccctttggggccgggaaagcccctgagtccagctggcccttctttcccaaggggtcctggtggtcccagttccccctacaggagtgcaaaggagggaagtcaagctccagggaggggatgtctccctccaatctgtgactcagggccccctcccccatgagactgattctgagtccttggttgatcttggatgttcaaccaagatctccagtggacagtgtctcaccttggccccctctctgccttccaggccaggaagaccttgttcaccaggaggtccaggggggcctggaggccccctttcacctagaggtcccacttctcctgtctttccctggtgaggaagaaggctcctgttgagtgggggtggcctaggggagtcgctcaggagtccagctttcccctaaatatcccccaactggtacaaaacaagggaggtttatggagtccactctgacctgagggcctaagacaccagctggtccaggcgggcctgtctgaccttggaagccctagagagaaaaattaaatgtgggggcggtgttacatggggaagggatggaggagcaggagacagggaaggcctgataggatcaggaatctggccggtccggtggctcacgcctgtaatcccagcactttgggaggcagaggcaggtgggtcacttgaagccaggagtttgagagcagcctggtcaacatgatgaagccccgtctctactaaaaatacaaaaattagccgggcgtggtggcacgcgcctgtagtgccactcgggaggctgaggcaggagaattgcttgaacctgggaggcaaaggttgcagtgagccgagattgccccactgcactctagcccaggtgacagagtgagactctgtctcaaaaagaaaaaaaaaaaaaaggatcaggaatcaaaggttgaggggttactcaccagttctcctctctgtccagggtgccctggtcgcccatctttaccttggtgaccctgggggatgaggtgggaaaaagttggggcacagatacagggcttcctcccttcccacatcctccacccacccaacccccaatgagggtgacctcactcacaggggggccctttggcccagggaatcctggagggccttgcagaccagggaggccctgaaatggaaacagaaatcatgatctcatcccccctgcctccctgcccactccctgagccccacataatgacaacaggatcgagcacatattgagtgcttactgcatgccaggcatgggcagggcattctccacaagtcagtcattttattcaccactgtagccctttgggttggagactgaggttactcccattttacagaggagaaaactaaggcacagagtggttaagtgacttgcccaaggtcacacagtaggtgagtggcagagccaggacttgaactcatggctctctgacttcacaggctgtgctccttctttttttcttttcttaaagatggagtcttgctctgtcacccaagctggagtgcagtggtgtgattagctcacttcagcttccaactcctgggctcaagcaattctctcatctcagcttccagcataggtgggactacaggcgtgcaccaccacacccaattaagctgtgctcttaccactgcattataatgtctcttcatctcttgggtttgtcctccactcagaatctctctctctcacacacacacacattcacacacacacacacacacacacactcaccttttctccagggatcccaggggctccatcctggcccacatcgccctaggacagagtgaatgagactcaggccccagaacaaactcaactgggaagaatttggagggactggctgagcctggggcatggggggccttgattgcccacccatcccataccttggggcctggttgccctgtggcacccggttgccccctctctccacgggaaccctgaacaaaaaaaaaaggcaaagatcagatatgagggggtgggggagcctgggagatgagaccaagtcttccaggtcccctccccttgtgactccctctcctgcccgaccagggacattgatataacccaaaccctttccctgcccacagatgacctctccactacctttccttcccagccctgtccccaagtcccagcagggtagggggcactgtctattttcttactggtggtccccgctctccttccaggcctggctgccctgtctttccctgaaaatgaattgtaagagagaaagcagaagagagttagggtgcaaaggtatgacgcaaacacaaaaagacacccagtcacagacccagaaagctgtctgccacatatttattcacaagcttttcagtcatacacatacacacaaatacaacttatactcaaaaccacacaaagatctcaaacacacaattacaactatgattgcatctacagagtacaaacgtgcaagcatgtttgcccacaagacatatattgatcacagctgtgcagtatgcatacatgattgcatgtaatcatggcatgcatttggcaatccacagcctgaagatgacacagaactcatcatgcaatacatctcttgcacacatgtatacccactgtaaacacatgaaggcctggattcagctgaggactttgtcttggtaagcacagcagtatacatacactcatgtacgtacatacaatgttcattaacactgttacaatacacacatagcaacacaaatacaatacatgcatgtatacccatcactcagtgtgcacagaaacacacacatgtgtatacacatgtcctttcacgcatatgtacaagcttcttgcacacatttatgcccaccatcatgcaaagtgcacgcagattcatgcccttgttcacccaggcacaggcctgcaggctgcggcattcaaaccctgtctcatcgatattgaaagatacatgaaacacatatacatgtgcttacagtcatattcatgataataccatgtgtaatcacctacatgtgtcatgcattgcatataatagcatgtgtgcacacaaatgttccaggcatagacacaaacacccagggtccacccatcatcagacacaaccacacatgctgttcccctcagacaagttctcccctctcccttacccccggtcatgactcaccgacttccctttctctcctatgggtcccaggggaccgggaaatccaatagatccctgagtggagagaattagaaagaagacatgagggtgaggagtgagtggtgggtggaattggcccctcataccatcctttgaggcatttccaggtcactgattccagaagcttccttggtctctacagccccagcctcctacaaggcagccctcttctctcctctcccctcctctcctcccttctcatttcactgcagccctttgcactggctgctgtctttggctgaaatgcttgtctcctaggcctccacaaagtcagccactcctgaccatttagatctcattcagatgtcacctccttagaatgcctttctaccaccatcctggcttccacattgcccaagtcaccctctgtctgtcacattatgctattttgttttcccaagaacacttgcgttgaaatgacccttattgacttatttattcaatgcctgttttcccccactgtgacatagctcattggtcttattccccactgcctggcacacggtgagtgctttttaatatttgttaactgactccagtccatgctggaggaacccttcctccacctgggggaagacatcacaggctctgatatcctctcccacacctcactgtgcagactgagttcagatcagaaaagacagttgcccaagttacacagtctgtggtggcatcccgcctcaaagcccatttcaggctccctctactctcccttcccatctgggggttccatggtctctatactctttttttgtttgttttatttttaagagacagagtctcactttgtcacccaggctggagtgcagtggtgcaatcatagctcactgcagcttcaaccttttgggctcaagtgatcctcctacctcaacctcctgaatagctgggactacaggttcacgccaccatgtccagctaatttttgaaataaatttttagtagatatggggtctcactatgttgcccaggctggtcttgaactcccggcctctagtgattctcctacctcagcctctgaaagtgctgagattacaggtgtgagccaccaacctggccccaacactcttcaaggatcctgaacacatgcacacaaggactttctaaaatcttagtctatgtcaggtacagtggcttatgcttgtaatcccagcactttgggaggccaaggtaggagaatcacttgaagctgggagtttgagatcagcctgggcagcatagcgagaccctgtctctgtaaaaaatttaaaaattcatcaggtggtgcgcacctgttgttcccagctactcaggaggctgaggcaggaggactgcttgagtccaagaattgggggctgtaataagctatgatcgcactattgcactccagcctgaatgacagagtgacaccctgtctgaaaggaaagcaagcaagcaagcaaaaagaaagaagaaagaaagaaagaaagaaagaaagaaagaaagaaagaaagaaagaaagaaagaaagaaagaaagaaagagaaagagagagagagagaaagaaagaaagaagagagagagagaaagaaagacagacagaaagaaagaaagaaaaaagaagaaagaaagaaggaaagaaagagaaaaaagaaggaaaagaaaagaaaaaagagggggacgcagtgagggagggagggaagaaaggaaggaaggaagaaaggaggaaggaaggaaggagaataaagttgtccatcaaaactaagcttcaaagtttttttctcaatcgttaaaaagaaaaaaaaatctaagttaaaggaaaaggagtcaatgtaaagggaaatcactgaaaaaataaaaaaaaaaaaccactgtcaaatccaacgtaggcaagataactatcagctcaacagcacaaaaatgtgaaactctaggaggattctgcactcaattatcttcccaaatgtctattttttttttcttttgagacagagtctcactctgttgcccagggtggagtaagtggcacgatctcagctcactgcatcctctgcttcccgggctcaagcaattctcctgcctcagcctccatgtacctgggattacaggcacccgccactgcacccagctaattcttgtatttttagtagagatggggttctgccatgttggccaggctggtggtgaactctcgacctcaggtgatccactcgcctcggcctcccaaagtgctgggattacagccatgagccactgcgcccagccccaaatgtctttaggttcctgctctactctagagaaacagaactcatcagtgatataatatgggaatagtttaggcagaaaaatgaatctcatcagtgtcctcacccatcaaaacattggcaaacaaatgttatgttttcatataagtacgtttttgcataagtacatttgactataagttataattaattcaagatatgtaagatgtgtattttatgattctatgattctcccctttaactgactttgttggtgaatgaaacttaatcacaccaaataaaaggatcctacagttttataatcattgtcatcatcagcattatcaacattattataatcaaattgatgaggtggaaattactgggatgtctgtttcaccgcagagaaaacaggctcaagaaactttcccaagatcacatagcgggtaagagggcatttgaccccaagtctgtctgatgtcaaagctcactttttaaaaaaatttttgagacagagtccccctctgtcacccacgctggggtgcagtggctcgatcatagctcactgcaggctcaatctccttgggctcaggtgatcctcccatctcagcctcccaagtagctgggaccacatctggctaatttttttttttttttttttttttttgagatggaatcttgctttgtcaccaggctggagttcagtggtgagatcttggctcactgcaacctctgcctcctggggtcaaacaattctcctgtctcagcctcttgggtagctgggattacaggtgcatgctactatgcccagctaatttttttgtatttttggtagtgacagggttttaccatgttggccaggctggtctcaaactcctgacctcaagtgatccgcctgcctctgcctcccaaagcgttgggattacaggtgtgagccactgcccccggccacatctggctaattttttttttttttttagatggagtttcgttcttgttgcccaggctggagtgcaatggtgcaatctcagctcaccacaacctctgcctcctgggttcaagcgattctcctgcctcagcctcccgagtggctaggatcacaggtatgcaccaccacacccagctaattttgtatttttagtagagatggggtttctccatgttggccaggctggtctctaactcctgacctcaagtgatccgcctgcgtctgccgcccaaagtgttgggattacagccatgagccactgcgcccagccacatctggctaatttttgtatgttttcatagggaccacgttttgccacgttgcccagtctggtctcgaactcctgggctcaagcaatcctctcacctcagcctctcagggtgctgggattatagccaagagccactatgcctggccaaagcccacattttacattctctcagtgacccttggggtgggcagctcatcccccaagaccacagcctggacccccagatgttagtctctgaatcctgcccatatccatctccaccccccacccccagcttcctaccttaggtccagggcgtcctggataacctgggaggcctggcaccccaagcttgccctgcagaaaggttatgggacaaaggtcagaaattgcaacctggaggtcagaggcggaaaggtcaggctggctggggcatggtgaatgggctaatgggatgggagttggggaaacgaggttcaagtccttgctcctgcctgctaggggcatgtccttgggcaggtcattcagccattccaagtctcagttttccttgtctgtaaaatgggatgaaaatgcctattgcatgtggtggttatggatatgaacacataagttgcatgcattaaattgctctgtaatgctgagctgaggaattaaagatgacaaggttggtagcaacctcctgaggtcgaaggtataataaaagggcaaagggcagagggaaaagattggggacaccttgactgtgggaggctagagggtggagagtcatttaccttctccccagctgagcctgggggcccctcctcgccagcctgccccgcctgccccttcggcccctcaggaccatcctctccccggggacctggagctccgggtttcccctggaagaaaaaggagagtatttaatatccatcttttgtccttcctgctctgtctagccccagctcatcccctccctatcttccccgagcccccagacccacaccacccctcatctggagctggtcttacctgatcacctttgagccccacatcgcccttgaagcctgggaagccgtcctctccctgggtgggagagacagaggccagaagtgagggcctcggggaagggacacaaccaggaccccatgattgggactccctctcctctgatgagttccttctctcctcaccttctcgcctttctccccctggaggccccggttgcctgaagtgccctggaaaataaaaaaaaaaagctctcaagcctcttccctgcttaagaagtgacccagactcagtcccctgctctaaagcagccaggatagtcccaagaggaggctaggcagaagctgggaggggcagcttcagaagaaatgatctttccccagaggcccctccctccccactggaggcctctcaaggtcatctgtgcgggggtgtgcagggaaggccaaatttccaagtaagcgattcccatctcctggagacgctttgtccacagttccttctggcaggagaaagaggatgaacattccaggcccggacctcattttaaaggcaaaggaatgttccccattgtgccagctacaaggcgactctgtgcttggcaacaagatgacctctgtgcttggctatggagagagcgcttagttcaagtctggatgctgctcacaccaaactctgaaaactgcacttggctacaacatctctgagctcagcgggctacaatgaaattgcgcttggatacaatacagcccatgtggttagtctccagctacagacaaattcacttgatcacaatgtaactgagcttggctacaagttgttctctagctttggctacaatgtaactagactcaactacaacataggggttggctacaatgtaactagactcaactacaacataggggtcagttaatgtttctaaaggctgggcatggtggcttacacctgtaatcccaacattttgggaggcagaggctggaggattgcttgagcccaggagttccagaccagcctgggcaacacaggaaaacctcatctatacaaaaagtacaaaaaaaaaagaaaaaaggtagccggatgtggtgacgtgcacctatagtcccagctacctgggagggtgaggtgggaggattgattgagcctgggagctctaggctgcagtgagtgaactgtgatggtggtactgcactccagcgtgggtaacagagtgagaccctgtctcaagaataataataataataatcaaatgaaaaaactgccaagcctggtgggatacgcctatagtcctagctattcaggaggctaaagtgaggggattacttgagcacgggagttcaaggctgcagtgagccatcattatgctgctatattccagcctgggcaacagagaagaccctgtctctaaaaaataaaacatttagggccgggtgtggtggctcatgcctgtaatcccagcactttgagaggccgaggcggccggatcacctgaggtcaggcgttcaagaccagcctgaccaacatggagaaatcctgtctctattaaaaatacaaaaattagccagacgtggtggcacatgcctgtaataccactactcgagaggctgaggcgggagaatcgcttgaacctgggaggcagaggttgcggtgagcccaggtggcatcattgcactctagcctgggcaacaagagcagaaccaggtctcaaaaacaaaaacaaaaaaagattaaaaatgtaattatgcttggctacaatgtaactctgagggtgatgcttgccagactctgtgcctgctacagtatagccaattccttgattatagtgtgtctaagcttgtctaatgcacacatgttcaggtaaattacatctgtatttggctacaatgtcactggactcagcttccatatggatatgaactctaatgcccctgcacctctatttagccaggttgcagctcttggcttaacccagcatactgtgcttatgtgattctgagcttgggttagaacacaaccctcgggccaggcacagtggctcatgcctgtaatcccagcactttgggaagccaaggagggtggatcacctgaggtcaggagttcgagaccagcctggccaacatggtgaaaccctgtctctaataaaaatacaaaaattacccaggagtggtggtgcatgcctgcagtcccagctactcaggaagctgaggcagtagaatcgcttgaatccgggaggaggcagaggttgcagtgagtggagatcgctccactgcactccagcctgggcgacaaagcgagactctgtctcaaaaaaaaaaaaaaaaaaaaaaaaagaaagtaaagaaaagaaaaggaaaaaggaaaagagaaaagaaagaaatgtgtttggcctctaatgggcttagctgttctaacaacaaggtgacaaccacactgtaaggctgtccttggctgtgcagctccaaaccccagtcccactacatttggcctggccaactgattcccctctccacacatccagaagtttctgatggagctgcatcgcatgcctgaacccaaagctggtaaatcactcatacctgcaagcgtatcacctaccttcactccccgaggtccaggatagcccggagggcctgccgaccctggtggaccctgggaggaaaataaggtcagtgccattctagacagtcccttccacattctaagagccctcatctctctcctctgtggcccctgactgcaggccctgcctcccgaccctcgtccccaacccagcctaacctcctggtcactcacctgagcccctttctctcccgtggggccctcatgtcctgggtgaccctggggaagaaacattctcagttgtcagagaccaaaacttgccattccaattcccaaggctcccctttctccttcctccttttcccagctcatggttctcaccagagggccatcggatcctgggaggcctggaattcctgggtttccagggggaccctgaaagaagatgaacagcaggggagagacagaggtgctcagagccctggagcaccactaggatctacgcagacatgcagccgcctcaaggttaagaaataagcagacctcactggccaggaaatctatcccagctctgcccaaacttgctgtgtgaccccaggcaagcccatttccctctctgatcctcagaaatccactgcctctgggaaggttgcaaggaagaacataaaaacagtacaagattgatagcacaacagggtaactatagtcaattatatgtcgcccaggttggagtgcagtagcatgatctcagctcactgcaacctcttcccaggttcaagtgattctcctgcctcagcttctccagtagctgggactacagcacccggctaatttttgtaattttattagagatggagtttcactatgctggccaggctggtctcaaactcctgacctcaagtgatccacccacctcggcctcccaaagtgctgagattacaggcgtgagccactgtgcccgccttccctggcagacacacttctgtgtgataatttacttgtacatttaaaaataactaaaagaggccgggcgtggtggctcatacctgtaatcccagcactttagaaggccgaggagggtggatcacctgaggtcaggagttcaagaccagcctggccaacatagtgaaaccccgtttctactgaaaatacaaaaattagctgggcgtagtggtgggcacctgtaatcccagctacctgggaggctgaggtggcagaatcacttgaacccgggaggtggaggttgcagtgagctgagatcatgccattgcactccagcctggacaacaagagtgaaattctgtcaaaaaaaaaaaaaaaactaaaatagtataactggattgtttgtaacacaaagaataaatacttgaggggatggatactacatgacatgattcttatgcgcatgcctgtatcaaaacatctcatgtactccataagtatatacctactatgtacccacaaagataataaataaaattaattttttttttgaggtggagtctcgctctgtcgcccaggctggagtgcagtggcaagatctcggctcactgcaagctccgcctcccaggttcatgccattctcctgactcagcctcccgagtagctgggactacaggcgcgcgccaccacgcccggctaattttttggtatttttagtagagacagggtttcaccatgttagccaggatggtctcgatctcctgacctcgtgatccccccatctcagcctcccaaagtgctaggattacaggtgtgaaccaccgcacctgaccaataaaattaaattaaaacagtgcaagagacatgttgaaatagaagcttcacagccacacccctttctttaaaaatgcccagccgggcatgatggctctcgcctgtaatcccagcattttggggggccaaggcagatgaactgcatgagcccaggagttcaagaccagcctgggcaacacaggcagaccccatctctacaaaaaaagaaaataagaaaagaaaagaaaaattagccaggcacagtggcatgcgctgatagtcccagctactcgggtggatgaggtgggagaaccacctcgcctggggaagtcaaggctgcagtgaggcattattgagccactgcactccagcctgggcgacagagtgagaccctgtccacaccccccaaaaaaagatatgtgcagaaagaagtgtgtctgccagggaaggcggaagcagatgtgccagggaacaaagatgagacccacagggcctgtgcctcttggtaatatcttctgtgacaggcttctgtgggctctctgtatcctgacaatatcccttatgtgagctagccttggtgggtttctgtttcttgcaaccaatccttccccaacaaggacactttgtatctccgggctggcttagggaatgttgcagtctatcactatccagagctaacagaggggtcttggtgggaagattttcctggcaacagagttgaaggaagaagacttgaggaggtcgcggtaggtggagctgtcactcaccttctccccaggagtgccaatgagtccctggggaccggggagtccctggagacagaaaaagaagatgagagaaggcataagaaagaagcggtgagtgtggaggttgggaagcctggtcacggtctaaggtcttaactgaccactcccatgccccattattgggaaagacagttcaaacctgggacccatggtttccctgctgtcccggagggcctggttctcctggaggaccctggggagaaagtggggtttcagtgaagctaagaggggtcatggtgttggggcgttagtgaaattgacttggggggggtcagtcatggaagggaatagggatgtggacaatcggggtcagagtgtcagaagggtcagaggtcaaagggcacagggcacataccacattgcctttggcaccaggagcaccatcaattccagtcacaccctaggggaaaagaggatgtgagaccaagacagagcaacaagctgggagcctgagtctgagacaccgagagatgcaggtggaaaggtgagcagggccgggcactgtggctcatgcttgtaatcccagcattttgggaggctgaggcaggtggatcacctgaggtcgggagtttaagaccagcctggccaacattgtgaaaccccgtctttactaaaaacacaaaaattagccaggcatgtaatctcagctactcaggaggctgaggcaggagaatagcttgaacgtggaaggcggagtttgcagtgagcagagatcgtgccattgcactccagcctgggcaacaagagcaaaactctgtctaaaaaaaaaaagaaagaaagaaatgtgagcaggcagagaagccagcaacagatatggacatgcagaaggcagaaaagcgagaaaaaaaagacagacaggggccaggaacagtggctcaggcctgtaatcccagcactttgggaggaccacttgaggccaggagttcgagaccaacctaactaacatggtgaaaccctgtctctactaaaaatacaaaaattagccaggtgtgctggtgggtccctgtagtcccagctactcaggaggctgaagcatgagaatcacctgaacccaggagccggaggttgcagagagctgagatctcgccaccgcactccagcctgggcgacagagcgagaccctaatctcaaaacaaacaaaaagacagacagggatgcagagagccagtgacactcaccgggcgacccgtggggccaggagagcctctggggccaagcagtcctcgtggaccctgcaagggagcaggcgaattatttccacatcacctctgtgtggccatgtgagctctaggggtcctatgagtcctggggccctgggagtcctgactccctcccctgcaccaagcaaggggcccagggatccctgatactcaccggctccccagcctggccagtgggccctggaggtccctctgctccctgtggaaaagcgtcattacttgggaacaggaaggtacaaccctcggagagccacctcccctcatctgggcagccccttccagggggtctcggaattagaccaggatccctgggaacctgcagactaagttcatgggattccattcaggcccctgactccaatcctagacctgcaagtctcacctcctcaccccacaatttgtccctagctctcaagctggccactgagacctccagatcttcctctctgattctcactcaggcttccaaacttactttccaaaccaggccctaactctcttccaaacttaccctctcaccatcctctcctgggggaccgggttgccccacatggccaaagtcaccctggagagggaacagaggggagttcagagtggaagggtgtgggcggagagaccagccccctgggaaggcagatggggtgtgaggagggacacagggatcatgactctgatactgagggagaagttgggggggcttgaatattgggaggagggcttagacttgggggagggacctcacacactcaccctttggcccttctcaccaggcagcccagggaggccatcgaagccacgatcaccctgtccagagacaccagtgagccttgaccccataagcctgacagctcccaccaagtcttatctcagcccccatcacctaccttaggtccagtgtcccctgggaggccccgagctccatctgctccagggcggccctatggagaaagtaagcccaagagtcaaggatgagccttccctgtacccctccaccaaattaggaacccaacttcatcatcaacatcaagattttttttttgacagggtctccttctgtcactcaggttggagtgcagtggcacgttctcagctcactgcaacctcagcctcctgagtagctgggaccacaggtgcatgccaccaggcctggctaattttttatatttttggtagagatggtgggggtttcaccctgttgctcaggctagtctcaaactcctgaatgcaagcgatccacccacctcagcctcccaaactgctgggattacaggcatgagccaccatgccaaggctaagatattattttttttaatttatttatgtattttagagctgaggtcttgctctcttgcccaggctggagtgcagtggcatgatcatggctcaatgcagcttcgaattcctggctcaagcaatcctcccacctcagcctcccaagtagctgggactacaagtgcacaccaccacacctggctaattttttatttgtattttgtgtagagaccgggttttgccatgttgcacaagctggtctcaaactcctgggctcaagccatcctttcacctcagcctcccaaagtgctgggattagagataccagttgctatgccatggctgattttattttattttatttttttgagatggcgtcttgctctgttgcccaggctggagttacatatatgttttacatatatatatatatatatatatatatatatatatatatatatatatatggtcacatgtcactgaacaacagggatacattctgagaaatgcatcagtgggcaattttgtcattgtgtgaacaagatagaatgcacttacacaactctggatggtacaacctaccaaacacccaggctatgcggtataacctagtgctctcagactacaaacctgaacaatgtgcgactgtactgaatatcacaggcaattgtaacactatagtaagtatttgtatgtctaaacacatccaaacatagaaatggtacagtaaaaatacagtattataatctcatgggaccagcatcttatttatttattattattattattattttttgagacacaatctcactctgccacccaagctggtgtgcactggctcactgcaacctctgcttcctggattcaagccattctcatgcctcagcctcccgagtagctgggattacaggcgcacgctgccatgcccggctaatttttgtatttttagtagagacggggtttccccatgttggccaggttgatctcaaactcctgacctcaaatgatccacctgcctcggcctccctaagtgctggtattataggcatgagccactgcgcgcagccaatcatcttataagcatcattatgtggtgcatgactctatctgaagttgacttgtttgtcatttccttccatgtgacaggcctcttttttgccgtgctgtttcttccacttccccatctgttcatctggttctatttcagatctcagggcaagcatcactcctgcaggcaagtccttcctgactctacggcctggccggattcctttgacacacactcagtggagctgccattccctgccttcagcactcttttcccactaacgacaccagcagaccccaaggtcacaaagccaaggctcatgttgggtgttgagggatggataaggggtggtctggggacctagctgtcactcaccatcttgcccactcggccagggggtccatgaggtccctgcaggcctcggggaccctagaagaaagcaaaaaggaggaaggaaaggaaaataagaagaaagagggacttattctattgtattaaaaaaaattagagatggggtcttgctgtattgcccaggccagacacctgggctcaagcaatactccctcctcagcctcccaagtagctgagacaagtgtgtgccactgtacccagcttggaaggacatatttatttattgtatagacagggcctccctatgttgcccagactggtcttgaactcctggcctcaagcaatcctcccacctcggcctcccaaagttctgggattccagatgtgagccaccattctctaggaaagtcatcaattgcaagggtatccccagcccctttggcactttccccatccagcactgtatcttgtggtcctgggggaaggctattcccatcctatcctgccctatctccacaagtctcacctgtggcccttctgctccctcctctcctttcagacctggatgcccggggagacccttgggggaggagagatggaggagtgtgggtagatgattcttcactaatgcatgcaccgccccctccacgcagtcgccttactcaccacagggcctgggcgcccagtgagccccactggaccaggggggcctttcatagagagctggaaagacagaggagtcagagcttggggcctcccacaagacccccaacattccccacagaggcatcttcaggagaaaaataacccccttctcctgcccagcccctccttacgccgaggctctatcactctctggggttcctcccactatgtccacacctcccactcacctgagtctgctgcagaactgcctgagcctgggcctgctggaatgagactggggggcctttaaaggagccgcctgcaaactggaactgggaggaatttagtggtgagggaagcccccaggagaggccccctcctggatcaggactccactccccaaggctgggccactccatctccttcttaccggcatcatgatcacagtgcccggtgggcctcggatcccatcaatgccggggattcctgggaggccagcagggccctgagagagggatgggggaagagaggtggagacagggagagagggagagagagagcgaggacaggggaggcacagaaggatgagtcagaaagagagagagagggagagatggagagagacacagaatcaaagagggatcatggcaaggaaagagagagaagtagagagaagtggaaaggaaaagacagagatggaacagagacaaagagaaggggagagagggatggagaaggatgggggcagatggagagacatacagagacagaaacagagagacagagagagatagacagagacagaaaagccagtgaaagacagacagagatggagaaatagagagagaggcgaacatagagagatggacggagggagagggacagagaccaacagagagagacagaagagagacagagacagagtcacaacaggagaaagacagagataaaagacactcagaaacagagacaggcaaaagaagaaaagcaaagagtaggccccagcaacacaaggtgaaccagagaaatagttcacagatgggagacagagaacagaagaggtcagtgccagccccgggatggtgttcccgagtgccacaccctcatatctatgttcagactgtcacgctcccagccccaaacctcactcctctgagaagtgtacaccccagtgggagtctcttaccggtggaccagggtcgccagggaatcctggggggccgggagggcctgaggggccaaccaccccctgttggggacagagaaacaggagtcacaggaagtgcaaagtttgagctaggctgactttcaacctaccactgactctaacctcaggctgacctccctaccccactacagagccactccaactcccctaatgcaatactgacccccactcacccccaacgctactctcggacccctcttctttttttagagacggtctcactctgtcacccatgctggagtgcagtggcgtgatcatagctcactgcagcctccaactcctaggctcaagcaatcctcccaccttggcctcccaagtagttgggactacagttgggtgccactattttttaaaaaaatatatggctatttttaaagagatggggtcttgctatgttgcccagtctctatattgttcatcctccctattttgactcaccctttaagcctcaaatgtccactaccctccacttggccaggcaacattacaccccaactcctcactccaggggattaaacacccctcagctggaagggaaagactggaagaaggaaacacagccatgacttacttggggtcctggggctcctggaggtccctcaaactgctgcccctgaagggagaagtgagtgtcggtgaccgctgtcatcatgaagcctctcaaccccctcacaatccagacccctcaccttttcaatcactgcgggctctccttttgctcctttctctccagcaccctggggtggggtcaggggagatggagagaaaagagatgtgaacttggacataagcccttcagttatctgatcacacacacttgcacacacacacacacacacacacacggagtccaccctcagagccccttctcctctactgtaaccaatatgcactgagaagctcagccccccgcatccaccgggcaatgccatgccaaggtgaatgaagagcgtgaaatccagagactgctgcccaatactgatcctgcatctgcctcttactaactgagtgatctaactaagttgggaaacttagtcaacccctatggccacttacaggtaaccggtcaacctgtaaagtcagtggatgaatgacgcctgtgtatatatcatgcaaagatgaatgaattaaaacaatgcttggcacacaacaagcactccaggtaacaaggtagcaagggcaagttagttacaactatgtgtctatgcgcctcccctgtggaacacctaggcttttcctttctccctttctttctttccttcttctttttctttcttctttttttttttttaaatggagtcttgctctgtcccccaggctggagtgcagtggtgtgatctcagctcactgcaccttctacctcctgggttctagcgattctcctgcctcagcctccccagtagctgggactacaggtgcccgccaacacgcctggctaatttttgtatttttagtagagaccaggtttcaccatgttggttaggctggtctcgaactcctgacttaggtgatccacccgcctcatcctcccaaagtgctgggattacaggcgtgagccaccatgcttggctccttccttccttcctttctttcttttctttctttctttctttctctttctttttctttctctttctttctctttttctttcttctttcttttttcttttttttcagagtcactctattgcccaggcaggcttttccttttttctctctcttttttccttccttccttccttccttccttccttccttccttctcttgcttgcttgctttgcttggcattttttttttgacacagggtcactctattgcccaggctagaatgcaggggtacaatcatggctcactgcaacctcgatctcctcagactcaggtgatcctccctcctcagcctcctgagtagctgggaccacaggtgcacacagcaccatgcccagctattttttattttatttttttgtagagacagggtcttgctatgttgcccaggctgaactcaaactgggagccactgcacctggccttttttcttttctttttttcttttttcttttttttttttttttgagacagagtctccctctcgcgcccaggctgaagtgcagtggcgtggtctcggcttgctgcaagctccgcctcccgggttcacgccattctgcctcagcctcccgagaagctgggactacaggcgcccgccaccacgcccagctaatttttttgtattttttagtacagacagcgtttcaccatgttagccaggatggtctcaatctcctgacctcgtgatcagccctcctcggcctcccaaagtgctgggattacaggcgtgagccaccgcgcctggcccaagcctcttttcttttctctagagaaaggtcttgctctgccacccgggctgcagtgcagtggtgtgatcatggcttcctgaagcctccacctcctgggctcaagcgatcctcctgcttcagctgggaccagaggcacgaaccaccacgttcgattaattttttgtatattttgtaaagatagggtctcgctatgttacccaggcttgtcccaaactcttgggctcaggtgatcttcccgcctcaacctaccaaattgctgagattataggtgtgagccaccatacctggcctcagttacctcttgatctctaccctcttctcttctccctgcccttaacataaaaaaaaagcctaaaatttgtactgacttaagatggtgcttcggaacaacagtccaccatcttcttggtttgctgtctcttggaataaacctgcttttccttccaccaattctcgtctctcttgttttcctttcaaacatcaagccaccgagcttgggttcggttacatcgaatgcgtatccatctttctccaagaccaaaatggagcatgtcccaaagtggtccacttctctgcgtccctcccatcttcctccaggtcacgtcccgactgcagattgcgggcttccctgctgcccctctggctccccctactgtccatgtgccattcagcagccagagagctcttttttttttttttttttttttttttttttaagagatgggtctcactgttgcccaggctggcctcaaactcctggcctcaagcgatcctcccgcctcagccgcccaaagcattgggattacagccgtgagccactgcccccggcccagggggagcttttaaagctccaagtcagatcatgttccttcacaagtgctcaagtggcatctcctggtgcttggagtaaaagccaagcgcctctctctagtcacagagtcaactattagcacagtgcctgacacaagcaggtgcagaagtcaaaagagagactggcctttcgtggctccaggtagaaatcccttctaagacctcaagatgtgagaaaagtaagtaaataaaataacacaggaacagaagaccatataccacatgttctcacttataagtgggagctaaatgagaacacatggacacatagaggggaacaacagacactgggacctatcggagggtggagggtgggaggagggagaggatcaggaaaaataactaatgggtactaggcttaatacctgagtaatgaaataaataatctgtacaacaaaaccccatgacacaagcttacctatgtaacaagcctgcacttgtacccctgaacttaagataaaagtttttttaaaaaaagaaaaaattaaattaaataatttttttaaattgttcggttttttttttcaagatggagtctcactttgttgcccaggctggagtgcagtggcacgatcttggctcattgcagcctctgcctcccgggttcaagcaattctcctgcctcagccttcccagtggctgggatcacaggcgcgcgccaccgctcccagctaattttttgtatttttagtagacatgggatttcaccacgttggtcaggctagtctcaatctcctgacctcaaatgatctgcccacctaggtctcccaaagtgttcggattacaggcgggagccactgcgccctgcctaaataaataaattttaaaaaaattttaataggaatcccactctcttgcacctaaccccagccacctagaaactcacaggaaagatctggaactgagtccgagatggatattctgctgcccggaagtcagggcccatggtggaatcatctccttcttcatcctccctggctgccttggtctccagggtccccagctcggttccactgtcagggtccaagctcctctgagaacgttaggaaagaccaaagttttccctgacctccttattttctgccacccccgtaacccttggggtctcccctcttccatccccatccaacctctaggatcgtggcattgagtccagtagtcacagtggaggtgacgaccaaaggcgtgggggtcggaggcagatttggagctggagtctctgtcttggggatgtcagtggaggtctggagcagggatggagggagccttgggtctcgggtgagggcaatcaagacaaaagggaggcaccctcccactgtccccaggagctcccagtccggggacagggacagaggaggctccccaaagagcaccagaggccaatggagacaaaagtgtgccagctggaccagggctgccagcagagggagccaccgtggatggaggaggtgctgagtcaggctggccctgaagcccagtggtcaaggtcaaggtccaacattcagggccaggctcccggaagcctagcccacatgtcctctcccaaggcagagttcagcggccagcaggccacagtcagagagggagtggcggctccttctggcctggacagctgcagaggaactgggtcaaggtgggggttgggggggtgtgggaagagggtggtggggtcccaggtgaggggacaaggctgaggaaggggctgaagaggggcccactactcctggtgtttgtattcttggccaagaagatctggaactgagatgtagtgcaaccagtgactcccccaccagccaaagaccccaagcaatgacccccaccaaggaccccccaacccagtgacccaccaagaatgacctacatcaacagaccccagtgattctagaaccagagacccacaaacaacccctcccactcccatcaatggcctcaacctgttactgctccattcagtgattttcctaaccagtgacctcaaccagtgacatctcttggctattagcactaactagtgactctccaactaataacccccatcggtgacccctaatcaattattcctctaaccagtgatgctccaacagtgaatacccataaatgagcgcaacaaaagcgtcctaaccaatgacccccaaatagtaattccacccatcaatgacttcctaactaataattccctcagggactcccaaaccaattaccccatctgcgaccccctgaaaatcactcttccaacttgtggccccaatgagtgaccccactatgacttccagtcagtgaccacccaccaacaaccccccagtcattgaccccaaactagggacatcagtaacaccaataatggtttctatccatgaccttccactgtgatccccagctaggtgcagcccaaacactgacctcaattaatatctccctcaatgattccccactatccagcaatccctatcagggaagccaaataatgcccccaattaatgactctcccaatgaataactgtccccagtgaccccaagcagggaaccccaaacaatgacacactaactaatgaacacgtcattcaacccagccaatgatccccccttaaacagtagccctcatcaagaactcccttaaaatcaggaacttatctgggtctgtcccctccctctagtgccccaggactggagattgagggggtcagagatgggagagatcataagatgggacccacccccaccctgttatcagtcaccctgacagtcatcagtcagctgagagaagtcagagctcatggatccgagaccagagaaaaagatcatagatgagggaccagagattagtagagatgggagactagaagtcaagcaccaagaccagaagtcagacagtcaagaccggaagtcaggtggtcaaaaccggaagtgagaggtctcagggcccttacctggttctctgcggagtcaggaggtggacttgaggtccaaatttccttgttctttttcctgcccttccccttgcgacctcgccctttcttcctcccttttcccttccccttccgccgaggacgaggggtttctggttcaccctggggagcctgggagaagggttccagtcaggtctagagcatcccaccagcagagaccccatcattcaggtcacctggggtgaggctggctcatggcccgtgggtcctcactcagccctgtgacctggagtcaacgttattcatgtaacctggggtcaagggtggctcaggaatatgacttgaggtcaaagtcattcatgcctgggatgtgttggaggtcacgggtcacttaaccccatgtctgggggatgagaattcactctttctagggatctggagccaggaaggacccagcctgtgtcctgagattaggagtcatggagtccctcactcaccactgtggctgccggtgccaggttgtcacagtcggggaggtaccgctcacaagcctggaaggcagcctgaggatctgggcttatcagcagctcctgaatgtctccctgggggttgggggtgtaggagtcaaggagggcagccatacagccataggcttactctgaccccctaacccccagcagtcctgcccacctcctggcaccagggtgcaatgctcccccacccagagcatgctaagtataaggaagagatgaccccatcacagccctagtgatctctctaccccctgtaactaagagaaggaaagatcctatcaggggcacacccgatcccaaccacaagccacatcccacacatctgccccactagaggtgcatcagttccttcaccggttcaagtgattctcagcctcccaagtagctgagattacaggcgtgtgccaccacgcccagttaatttttgaatttttagtaaagacaaggttttgccatgttggccaggctggtcccgaactcctggcctcaagtgatccacccgccttggcctcccaaagtgctgggattacaggtatgagccaccgcgcccggccaagaccataaattgtgacgatgcctacttggcttgttgtgggaagagctggtactggggataaggaggaacatgagatagatcaggtccctggcctcccagaggtgacacacatcacggtcacacacagctaacaaaggtctccacacccagaacacatatcacacaaccacacaacacagctgcctgctggctcccaaagtcataaccgcccccacacaatcacacactatcacagcaaccagcaccatctcaggtcacagtctcagacacacgacaccaccagatctttccacaacaagccaagtaggcgctgtcacaatttatggtcttgtggctctgcaatctcacagtcatgcactgcaacggcacacacaagcatgcactggcacaactggatcttcccacaacaagccaagtaggcatcgtcacaatttatggtcttggccaggcgcggtggctcatacctgtaatcccagcactttgggaggccaaggcgggtggatcacttgaggccaggagttcaggaccagcttggccaacgtgtcaaaaccttgtctctactaaaaattcaaaaattagctgggcgtggtggcacacacctgtaatctcagctacttgggaggctgagaatcgcttgaacccatgaggtggaggttgcagtgagctgagatcaagccactgcactccagcctgggtgacagagcaaggctccatctcaaaaaaaaaaaaaaattattgtcttgtggctctgcaatctcacaatcacaggctgcaacggtgcacgaaagcatgaactcgcttcccttagcttcctggggatagattgaagcttgacatcttccttctttaatatcctctccagattcaggctgtagacaaaacatcccaccctctgcctcagtttcccccatcactgaactcctacctcgaaagtcttttccccaaggtcctgggtccccagcacagtgagtccagctatgctgatgaagcgggggccatggcccaaaacagggggctgagcttcacagtcagctaccagggtcaccatctcaccatctatgctgacggccacacggtgccacctgcaaggggacggcctcagtgcgggtgcttctcaccccaccccttatccacggacccccgcccactctccccatgctcacctgccatctgtgaggttgacctgctgggggagggggcggaaggggtcacctaggagacccagcgctggccccagtgccaggcccaactgccgggcacccctttcatcataaatggacagcaggacagactgattggctggctgtccccgcaaggtgatcagcaaggagaagttctcaggaaagtggccttctgggtgggcagagggaacaaggcagctcagagggcccagcagtgcctccctccggggaggtacccaggcctcctactccaactcacctggaaagagttcccacgtggggatgccgagcgtgctggcctggccaattctgaatgcccggtcaccctctggagtcctctggggacagaagccaggcccctcggggaccccagcctggcctccctgcacacccagggccttcaggacatccacaggatctgcagcagagagaagccgggggtgtcaggcagaggtggggaacagctagaataagcccaggactccaggatagaggctcagggtttttttagggggctcagcctctccctccctcccaccatgtttgtggctcaggaagaaggagccggcctgggcccccagcaccccccgcctcctcaccaccccacagatgttccgacctcagcagcttgttgactctgtttttttttttccccttggtttttggtgagaaaaaaagttgacctagttctgggatgaatcaaaacttcctggcctaagccccagagtggaacggtccccctctccctgctctcccgcgcaggctccctagggctatatcccaggcctggagcccccttgccaggggaaacccacgtggagaggaggggcttccagtgtgttttcttcccccacctcctccctctctctaacctcctcctttgaccaccatcacccacaacctcttccttttgactacagccattttggatctcctccctctgaccatctgcctctgaccatgcccactaacttctttttctggttaccccctctgaccttctgatcttcttctgcctgaccccagcctattccctctgatctcctttttctgtctgatcccaaactcctccttctgaatttcccctttgacctcttccctctgactttcacctctaacctcttccctctgaccctcctctatgaacttcctctctcagactttgccctctgacctcctccctctgaatgtctcctctgatctcctctcctgactttcccctctgacctcctccctctgactttcccctttgacctcttccttctgactttcccctctaacctcctccctctgactctcccctatgacctcctccctctgagcctcccctctgatctctcctctgactttcccctctgacctcctccctctgacattcccctctgacctcctccctctgacattcccttctgatcaactccctctgacctcctccctctgactaccccctgaccttctcccactgcctatcctgatctcctccatctgacccatgacctcctcatttcatctctctgacttcctccttctgaccagctgtctccgataacctccagacctcccctgtctgaccctctccctctttcatcccagctaaggaaaggacttgtctggcccaacagttcctaatctaggccatgctaccagccccaccccagcaggcagcccagccagtgctaagtggaaccacatggcttgggcaggggcgggtgggggcttcccctgggccccgagcccctgtctgattcccccatcccccaaccctcagcaaactgtcccactgaccccctgccccagcctcttggcgggagctggattctccagaatctgccatgacctcacccctgggggcggctctgctgatctcaccacggggagctggggcgggggggctaagacgttggggaggcacgggcttggatgaaggacccccattcccactcttcctaggtcagaaccctcattttccagactcctcggaggcctgtttcagcctctgtttcctcttgcctccaatctccttctctccccatccctgcccgccctctctctgtcccactttctgtgccgggtctttccaggcctccatctgtgtccaagtctctttctctctctctctctctttctctcattctctctctctcttctcaatctctctctctctccacccgccttccccaacccatcaccccagcccccatctctaattgcctgttttgtggctaggctgtcattaagagaaatctgggttgcagtcccctggggctgagatctgggctcccaggctctgctgaccacaagagtcacttccccacggaacaatcatcccagctgccccatctcagcctggggcccagggcaggattgagaccgacgacctcacccagcctggaggctctcccctgacccgcaccctaacctctctgcagaggaaagagggtcttccctcaactaccactcatttacattaagaaagtccttcccggcatccaactcaaagctctcctgcttgaaacttgtgtcccctctggaatgacctttcagaaactgactgccctttcttttcacagctggcattatgacaaaaaggcacacaagctgcattgagtcctgcctacaggggacaaggggtgggggggtctgtcaggggcccagcctgccccctgccactctcccctgtgctggtcagggcccccacggggatgttgggtggggtctgggatgtggagggacagaggcggggactgagtcagggcatggctgggaaccccccaggtgtgcgatgtgtgtgcaaatacgtgtatgtgcatgagattgtacaagcgtgggtgagtctgagtgagacaggcagagaatagctgggcatatgtcgtttctccaggtgtcaatgtgtgcaaatatttggcttctaatggagggattagatacacttgcttgacgtgtggccatgcaacgcttgccgtgagcttgcaggtgtgtctgtgactttaacacctcggacttctgatgggggagtgccgttctgtgtgagagtgtgacccagtgggtgagtgggtgatgggttgtgaatgttgacagtgtttgttcggatgtcaggggcagcatgtgtgagaatttgagcacgtgggagggtcataaaagctgggaccatttggcgggtggctgaagggggttgcctggacacggtgtttcacattcctggagtcccaggggacttatattcagagtggatgcctaagattccatgaccatgtggatgtgtgagcgtgggaatgcggcatagtccaatcagggattaaccatatggacaggcaccttcctggactccaaagtaagaagtgtgctgtggtgtgtgtgtgtgtgtgtgtgtgtgtgtgtgtgtgtgtgtgtgttgggagactgagctcaccttagaaagggatttccaggaggacctagtctagggtctctcagatcagggaagccccatctccaacacttgagaagctacgccatcccctgactcccgaagcgccccccactctgaaccctgaggggcgggacagggcgcccagccagatgcgcgcagctgggcgtgcgtcagcgctgactcacccatccggcggcccccgggaccccttgggggctcctgagaaattcctcgggaaaaacacccaaggctccagcagctggggtggggagggggggagcaacttccactcctgccccgccctgcgccccgccccgtctcgcccctcaccgcggccctccccgaagccctgtccatggtgctgatcgcggctctggggaccgcggggtgggggagggggcaacagggagggaggggaggagatgggcgctcgccaatttggggcagaggaggaaaagggagaatgaggtgaagccatttaaagagacgcaaaggaaactgtgggttcccgaagagcaccccccaatacttgtccccacccaccttcatcctcatgggcaattatttgcacccaaaaatcataactacacccctcatagcggcactcagagacacacaatcacacgcataaccactcacacggttaccctcgaaaatcagcacatagacaagagcacaagtgcatactcacctgtcgcaatacacaccgtcccagcactgccctgtcactcacagtcacactatcaccatcaacctccacacgcaagcacatacgcaacttcactccaaatgcacacacatgctacacacacatacacacatgcacacacctgcacattgcatgcattcccacgcgctcgccagaaaacgcactcacacatccccacccccaccccgagctgtcacacccacaaatcacccagagtcagatactcatgcgcccacatcacaccggggccgcacgcggcgcccacgcccttcccctccacgcccctccacccccctccacccctcgctcttttagagcctctctgagtcgtggaccctgggtcccatctcttccctcccggctcaccggcctgcgtccccggcagaagctgcagcgcggccaggagcaggcagagaccggcccgcggctggcccaggtcccggcggttccccatcccggcggggcccacgggcaaggcggggaaccagtcggggcggctgcggggcgcggcgacttctcgggctcggtgcagtcactcgcggcggccgctcctctcagggtccgcgggaaactgcccgagaccccgccctggcctcgccctgcgctccagcgcctggccaggcggggctttttggagggggagcgctgacagctggactgggaagttgggaaactttgtgctgagggctgattggctggctggggtggagcccagcgccaggagctgggttgttcctgccccaccccactgtggaggagaagggtcactcccacccagccctagagttcgagggttccagtcttaccccaaaccttttccgcctagcagatcccctcaaaggagaccttaacctcattcaagacttcagcctccatccaggccctagaattaggaggaggtgcagctttataccaaatcttttttattttctattatttttacattttattttggagacagggtcttgatctgtcacccaagctggagtgcagtggtgcaatcatagctcactgcagcctccaactcctgcgttcaagccatccacctgcctcagcctcctgagaagcaggtaccacaggcacacactgccacacccagctaattttaaaatatgtatattttgtagagaccgggatcttgctatgctgcccaggccggtcttgaacttctggtctcaagcgatcctccggccttgccctcccaaagcgctggagttacaggcatgagccaccgcccctggcaccaagtcctttctgcctcactcaggcccccaactggggtcccaacctcaccccgaactctcactcacctacctgctttatcctcagtccctcagctgcacaataggaggtaccagcctcagccccaaagcctttccttcaagtccctaacgggtcctcatcccacctcaaatctcaccccagatcccaaaatggggtccccagccttactccaaaccttcatctgtccactcaaatccctaagtcacgtgtcctggtcccaaattctcaccacagatcccaaaacacagttttcactttccccaaattcttgattcctcaaataaagggtctcatctccatccctaaccctcatctccccccgccccaactcaggtctccagtggatgccccggcctcaatcccaaatccccaccaaatgagggagtctgagctgggtgcggtggctcatgcctgtaatcccagcattttgagaggctggggcgggcagatcgcttgagtccaggagttagagatcagctggccaacatggcgaaaccccatctctactaaaaatacaaaaattagccaggcattgtgactggcgcctgtagtcccagctacttgggaggctgaggtgggaggatcacttgaacacgggaggtggaggttgcagtgagctgaggttgtgccactgcgatccagcctggacaacagagcaagactctgtctgtctcaaaaaaaaaggccggcgcgttggtgggaggtggtgggaatctgtccctgtcgcaaagcaacgcacagccactggggaggaaggggtggattcttgccattcttgggatgaggcagaggcccccctcaccgtgctgggacccccacctccagcatgaagaggcccccatgaggtcaaatagagcttttatgcaattggacaagcgcagacacgcaggatgtgagggtgtttccccagggaggggaggaaccaagaggcgtattctgagccctgaactgctccccgaaccctgcttcccccacctccgccccaggggaagagggagacgcaagcagtgcctccctcccagcctctgactccccagacaaagagtctctgtgtccctgaagaggaggggttggggccccatcaagcctgagggggagatgggggccccccagggtgggaggaggagagggtatctctgtaagctgtgcctcctcccaccccagggacatctgaggctgagacttctccaactaaaagactctcacaaaattcctgccctgccctgccttgctggaagttcttcctatagtctaactacatcttctgacagttctacaccccttccctctatgaaacacttctggatccacattctctgtctccttctctcactctctcccttcaatcagagattcttcacccagaatacagacactaattccccccaactttcacagaaactctccccagccctaaataatttatactcggccaggctcagtggctcatgcttgtaatcccaacactttgggaggctgaggcggctggaccacttgaggtcaggagttcaagaccagcctggccaacatggcgaaacctcatctctactaaaaatacaaaaattagctgggtgtggtggcacacgcctgtaatcccagctactcaggaggctgaggcaggagaatcattttaccctggaaagctgaggttgtagtgagccgaaattgcaccactgcactccagcctgggtgacaagagcaagactctgtctcaaaataataataataatttacagtcataataaaaattataaattaagaaaacagttacaaatggccaaggcaggaggatcacttgaggccaagagttcgagaccaatctgggcaacatagcaagatcccatgtctaaaagaaaaagaaatttaaaaattagctgggcatggtagtgtgcgccggtagccccagctactctggaggctgagataggaggatcgcttgaggctgtggtgagctatgatggtgccactgcactccagcctgagtgacagagcaagatgctgtctcttaaaaacaaacaaacaaaaaccagtgatgtctatagtaggtgcggagaagaaatgtttggcagatgaagaaaatgaggtgcagagaggatttaagagattctctcttactgcctgttcagggtcagtccagaattgagggtctccgggggagggcagaggctttgccctgcaggggatctgtgggagggggttaggagggagcagatgagcccaggatgaatggtcagagtcaggtgctgcccggcggaggtcacgagtccagggaggggatcaacatggccgctgcaccccggactgtgttgatctccggctgctcatcaggaattggtctggaacttgcagtgcaactggcccatgaccccaagaagcgctaccagggtaagaagtgcagggtggcactaggaggcagccgggtggaaacggcttccccagcactgtctcccctacccatccctcccagctgcacttgtgggcttggggagacccaggattccctccaggaatcatcccctcatcctagaaatatttcttgagcatcttctgggtgctctgaatgctggcaacacaactggagatgaaatagacaaaaatctcagccctcaggacgggtgtcatgtggggaggagagggagaatgggtgataaacagataaaaagaaattgttgctctatctggtgggaataagtgctgagacacaaaataaagcatgctgagagtggcagggggtgggtgggggttatttttagaagggtttcactagggcatttcctagattggaataatcactaccctgatgctcactcttccacgtctccccagattattgcttttactgagataagcttcttaagtgctcctgaccttgggggttgaagggatggccttctagttctaagaacttgcccttctgcacctctagaataaatccctgggacctgcatcctaaccaaccaggagaacccctgacccagagggagcatgctggagtcaaagtgggcaaagggttgttacttacaaagaggcgactgggggtgagggcattgccccagttggcagggctgcttctcccagccctctgccctctgttttagagacgcacacagctttgagcatgacagcctgaatgccagtgtgcagggaataacgtgtgtccctatgggcgggcagatgggtgtatgaaactgctggaggctaatgtttatggagcttttacaatgcaccaagctgcattctaagtgccctgaatccaggaagtcatttaatcctcacatcacacccgtgaggcaggcacaatcattcaccccattttattattattttattatttatttattttgagtcagagtcttgctctgtcacccaggctgagtgcagtggtgcatcttggctcactgcagcctccacttcccacgttcaagtgattttcatgccttgacctcccgagtttctgggattaaggcatgcaccaccacacccggctaagtttttgtatttttaatagacaaggtttcaccatgttggccagaccggtctcgaactcctggtctcaggtgatctgcctgcctgggcctcccaaagtgctgggattacaggcatgagccaccgtgcctggcctgccctattttagaaatgaggaaactaaggtgcagactgtgaaaggtctttgctcaaggtctcccagctgcaaagtagcagagctgggatttgaactcaggcagcccatcccttgcacccatgtttcccactatatcacatgtagatgcaagtgaccccattcacgtgcctgctacccacaaatcacactgacccgaagacaagaggcaaatgcccccaggagtgttcatgggtgattatgggtgcacacattgggggatatcaaacacgtatgctggtgcatgtgcagacatagtacatatgctgaggtcctgcttaagaacataagcttgaggctgggcacagtggctcatgcctgtaatctcagcactttgggaggcctaggtggacagatcacctgagatcaggagtttgagaccagcctggccaacatggtgaaaccccgtctctactaaaaatacaaaaaattagccaggcgtggtggtggatgcctgtagtcccagctattcgggaggctgaggcagaagaatggcgtgaacctgtggggtggagcttgcagtgagtcgagatcatgccactgcactccagcctaagcgacagagcatgactctgtctcaataaataaataaataaatatacaaaaattagccaggcatggtggcagtgcctataatcccagctacttgagaggctaaggcaggagaattgcttgaaccgggagacagaggttgcagtgagctgagatttcaccactgtattccagcctgggcaccaagagcgagactccgtctcaaaaaaaaaaaaaagggcataaaagcttggccaggtgctgtggctctctggctcctcacgcctgtaatcccagcactttgggaggatgaggtgggcagatcacctgaggttcgagaccaggctgaccaatatggtgaaaccccgtctctactaaaaatacaaaagattagccaggtgtggtggcaggcacctgtacccctgtaatcccagctactcgggaggctgaggcaggggaattgcttgaacccaggaggtggaggttgcagtgagccgagattgcacccctgtactccagactgggcaacaaacaagagtgaaacttcgtctcaaaaaaaaaatatatatatatatatggctattcacttcagtgttcatatatgcacatatgttggctatagttgtgtatgcatttttttcatggcaatctgttttatgtttatatattttattgtcttacctactaggctataaattccatgaaggcagaaactttatcttatttatttatttatttatttatttatttatttatttattttgagacagtctcgctctgttgccaggctggagtgcagtggcgctatctcggctcactgcaagctccgcctcccgggttcacgccattctcctgcctcagcctcccaagtagctgggactacaggcgcctgccaccacgccaggctaatttttttttttttttgtatttttagtagagacggggtttcaccatgttagccaggatggtctcgatctcctgacctcgtgatctgcccacctcggcctcccaaagtgctgggattacaggcgtgagccaccgcgccaggccgcccggccttattttttattttttgagacagggtctcactctctcacccagacggtagtgcagtggctccatctcggctcactgcagcctcaacctcctgggctcaagcaatcctcccaccacagcctcccaagtagccaggactacaggtgggggccacccaccacacctggcaaatttgtaaaatataatttttttgtagagatgggatctcgctatacttcccaggctggtctcaaactcctggggtcaagcaatcctcccacctcagcttcccaacgtgctgggattacaggcttgagccaccacacctggtgactttatcttatttcatgccatagcctcagcacctagaatagggcatagtgtatagtagatgctcaataaatgtctgttgaactcatggttggaaggatggatataggtacgtggagatgcgtgtacacaagtgtgcacttgttggctgagtgataaatgtaggtgtgtaaacttgtgagtttccatctctctgtgacttgtaacgcaagatcacagacacgtggcgcccacaccaaggggaaaggagctcagtgcctgtccctgctttactctctgccccgcagtcgtggccaccatgagggacctggggaagaaggagacactggaggcagctgctggggaggctctggggcagaccctcaccgtggcccagctggacgtgtgcagtgatgagtcggtggcccagtgtctcagctgtatccagggagaagtggacgtgctgggtgagacttcacagcccctgattcactaagccccatcctggtctgagtatagaccctcaatatggcaaggtctgagcaccagctctctggcttcttcagcaatctctgaacctgggcagaaggggtagaccagttggccaagaggggtagaccagttggtcctaccaattgatttattaagggctgggtgcagtggctcatacctgtaatcctagcactttgggaggccgagacaggaggattgaccagcctcagcaaaatagtgagactctgactctacaaaaaaattaaaaattagccagtcatagtggtgcatgcctaatcccagctactcgggaggccaaggtgggaggatcccttgagcccaggagtttgaggctgcagtgagttatgacagagccagtctggggagacagagtaagaccttgtctcaaaaataattttttttttgagacggagtcttgctctgcgcccaggctggagtgcagtggcgtgatctcggctcactgcaacctccacctcccaggttcaagcaattctcctgcctcgcctcctgagtagctgggattacaggtgcctgccaccatgcccagctaatttttgtatttttcttagagacgaggtttcaccgtgttggtcaggctggtctcaaactcctgacctcaagtgatccgcccacctcgacctcccagagtgctggaattacaggcatgcaccaccacacctggccaaaaatcaattttttttgagatggaatttcactcttgttgcctaggctagagtgcaatggcgcaatctcagctcactgcaacctccacctcctgggttcaagtgattctcctgcctcagcctcccaagtagctgggattacaggcaggcgccaccacacttggctaattttgtatttttagtagagacggggtttctccatgttcatcaggctggtctcgaagcctgacctcaggtgatccactcaccttggcctcccgaagtgctgagattacaggcatgagccaccatgcccagctcaaaaatcaatttttttaaaaaacaaaaatattagagacactagtaacaatctgaggcctggaggtggggcagattttatggaatagaaattctcatatatggagaaagccatatgtggttgggaaaattacttggatgagtcacttggggaagacagcatgatacagaaataagtcataaggtccctaaccttcgcaggaaggtgggtgtcgctgtcttgatgtaatttggggtcagaattgaattgctcatggattaaggggggcactattcccagcagcccttcctcccactcagggctgaggatcccctatgacaaatgctaaactgtgtttaaaggttaccaaggtttcatatttgtccacccaagataccctggactggccttggacttggagtacggggtgaggtgcttcagggagtgtctagaagtaatgctagaagagtgagggactttaaggtaacccttagtacctcttctcttagtgaataatgctggaatgggcctggtggggcccctggaggggctcagccttgctgccatgcagaatgtctttgacaccaactttttcggagctgtccgtctcgtcaaagctgtgcttccaggcatgaagaggaggcggcagggccacatcgtggtgatcagcagtgtcatgggcctgcagggtgagctgtggggacccaaccctggaaatcccaccagtgtctgatcctccccagactgggaggatggcgaatgggttttagatcatattctaaattagcatggaccctgggcacggtgattcatgcctgtaatcttagcactttgggaggctgagacgggtggattgcctgagctcaggagtttgagaccagcctgggcaacatggtgaaagcccgttcctactaaaatacaaaacaatcagccaggcatggtggcatgtgcctgtaatcccagctactcaggaggctgaggcacgagaattccttgaacctgggaggtgtaggttgcagtgagccaagatcgtgccactgcactccagcctaggcaacaaagtgaaactctgtctcaaaaaaaataataataaaataaaataaattagcctggagaattgtgttcagaaggattctgaagttcagaaggaaaaagtggccagacatggtgactcacgtctataatcccagcactttgcgtggcctaggcaggagggctgtttgagctcaggagtttgagaccagcctggtcaacacagggagtcctcatcactactaaaaatttttttagaattgggccaggcacggtgactcatgcctgtaatcccaacactttgggaggccgaggcaggtggattacccaagatcaggagttcaagaccagcctggccaacattatgaaatcccatctctactaaaaatacaaaaaaattagccgtgtgtggtggcacacacctgtagtcccagctactcggggtgctgaagcaggagaattgcttgagcccaggaggcagaggttgcaatgagctgagattgcgccattgcactccagcctgggcaacaagagcaagactctgtctaaaaaaaataaataaataagtaaacaaacaaacaaacaaaaaacaacaacaaaactttggccagatgtggtggttcatgcctgtaatcccagcactttgggaggctgaggctgatggatcacttgaggtcaggagttggagaccagaatggccaacatggtgaaactccgtctctagtaaaaatacaaaaattagctgggtgtggtggtgtgcacctgtagtcccagctactcaggaggctgaggcaggagattcacttgatctcaggaggcagaggctgcactccagcctgaacgacagagtgagactccgtctcccccccgccaaaaaaaaattaaattaaataaaaaaatcagccaagcatcctagtgtgtgcctgtagtcccagttactcaggaagctgaagtgggaggatcgcttaagctcaggagttcaaggctgcagtgagccatgattgcaccactgcaccccagactgcagaacagagcaacaccttatcaaaaaagaaaaagaaaaagagagagagagagaaggaaggaaggagggagggagggagggaggaaggaaggaagggagggaggaagagagacaagggccctaatgaagagaaaaatgaaggggatccccaagcggccccaaaggtttagagaatggagggaaataggggagtttcctgggaccaggtggagctgggaggaggtggcacccggcacccgagaacaacctctttctgaccccatatgaccccatcacacaatgccatacacccatcatcttggcaccatgtatctgctttctctggttcccacatcctctttgctctgtctcccaaagaccccatcaccctggaacccacaaagcccacctcccagaccctcaaagagctctcctccctctgaccctcacaggtgtcatcttcaacgatgtctatgcagcttccaagttcgccctggagggattcttcgaaagcctcgctatccagctgctgcagttcaacatcttgtgaggcgggcacgtgggcagagggggcttggagccagtgatggggaggtggcatcgaaagggggagaggagagatgaagacaatgaagctgagtgcagtggctcacacctgtaagtccagcgttttgagaggctgaaatgggaggatcgcttgaggtcaggcatttgagaccagcctgggcaacatagcgagacccccatctcagcccaaaatttaaaaattagccaagggtggtggtgtgtgtacctgcagtcccagctactcaggaggctgaggcggaggattgtttgaacccaggagttggaggctgcagacagctatgatcatgccactgcactccagcctgggcaacagagtgagaccctgtatcttaaaaaaaaaaaaaaatggacaaaataggtcagggagtggttggggcatcagacttacactacccatgcctggtcgccagcatctccctggtggagccaggccccgtggtcaccgagtttgaggggaagcttctggcgcaggtttctatggctgagttcccaggcactgaccctgagaccctgcactacttccgggacctctatctcccagcctccaggaagctgttttgctccgtgggacagaacccacaggacgtggttcaggtgagtgaagggcccagagccccaagacgtggctcaggtatgttgcggggtgaggccctccctgggtcccagcgctcagggcctccattctgcaggccattgtcaacgtcatcagctcgactcgaccacccctgcgccgacagaccaacatccgctactcgccgctgaccacgctcaaaaccgtggattcctctggcagcctgtatgtgcgaacgacccaccgcctcctcttccgctgtccacgcctcctcaaccttggccttcaatgtctgtcctgcggctgcctcccaacgcgggtgcggccaagatgagcagaacagagcttcacgatccccatccctgaacaaccagacctcttcattccacatctaattcaaaggatgaacagactcttcatttattcattctgcaaactccccctcccctcctctgtgcctagacatggctagaatcccagaagggcctttattttcaggcatagactcctctgtggtcacagctggagcacagagagggaccctgggaacttggcctgggaagcccagagcaggaagccacagctgtctctgggaaagcaagggaggcttcctggaggaagcggcattgttatgagccttgaaggaagagacagactctgctacattcaacctcgtgacttcatgatcctgggcctgagaacacaggaatgattcatagcccaccccccacctccatgcatacaccagagctctgtggaccaaggggtcattcctggtcacacactccatcagcaaaatgtatttgagcacacaccagcaatgtatgtatattttttccattaaatatatatttataaccacaagttgtagttacatttactatttaataaagctcaatttcttaaaattaaataaaaacttaaaaagccagttgaactactggctccaaagagagagagagagaaagcaagcaagcaagccagacatggtgcctcatgcctgtaatcccagcacttgggaggccgaggcaagtggatcacttgagtccaggagtttgagatcagtctggccaacatagagaaacactctgtctactaaaaatacaaaaattagctgtgcgtggtggcaggcgcctgtaatcccagctactcaggaagctgaggcatgagaatcacttgaacccaggaggtggagtttgcaatgaggccaagacggcgccactgcactccagcctgggcaacagaatgagactttgtctcaaaaaaatacaaaaacaaaaactcatgaatggataaacagacttttgtatattctttttttttttctttgagatggagtctcgctctgtcgcccaggctggagtacagtggcgcgatctcggctcactgcaagctctgcctcccgggttcatgccattttcctgcctcagcctcccaggtagctggaactacaggcgcccgccaccacacccggctaattttttgtatttttagtagagatggagtttcaccatgttagccagcatggtcttgatctcctgaccttgtgatctgtccacctcggcctcgcaaagtgctgggattacaggcgtgagccaccgcgcccggccaacttttgtatattcttaaagaggaaggaaattctgatacgtgggtaaatactgagaataccatactgagtgaaataaaccagatagaaaattccacttatctgagatgcctaaggtagtcaaattcatagagatagaaagtcactcagtgggcgccaggggctgagggaggacagaatggggaattagtgtttcatggggacagagtttcagtttgggaagatgagaaagttctggagatggatagcggtgatggttgcacaacagtgtgaatgaacctaaggccactgatctgtacagttataaatggttaaaatggtaatttttttttttttttgagacagagtctcgctgtcacccaggctagagtgcagtggcacaatctcagctcactgcaacctctgcctcctgggttctagcaattctcctgcgtcaccctcctgagtagctgggattacaggcgcccaccaccacgcctagctaatttttgtatttttagtggagatgggttttttccatgttggccaggctgatctcaaactcttgacctcagatgaccctcccgccttggccccccaaagtgctgggattacaggcataagccactgcgcccagccaaaaatggtaaattttgtagtgcacatattttaccacaactttgaaaacagacatagagtgttttagtttaaaaaaaaacttaatatagaccaggcacagtggctcacatctgtaattccagcactttgggaggccaaggcaggtggatcacctgaagtcaggagtttgagaccatcctggccaacatggaaaaaccccatctctactaaaaatacaaaaattagctaggcattgtggtgcgcgcctgtaatcccagctactccagaggctgaggcatgataattgcctgaacccaggaggcagaggttgtggtcagctgagattgcacctctgcactccagcctgggtgacagagtgagactctgtctcaaaacaaaaaccaaacaaacaaaaaaactgaatatatactttttaaaaaactttttcactaaaagcagcatactatacaaataaatgtgaactttagttgtttccttggatcatgtataccttggaggattttcttttttttcttttttgagacagggtctcactctctcccccaggctggagtgcagtggcgcaatctcggctcaccgcaacctctgcctcccgggttcaagtgattctcccacctcagcctcctgagtagctgggactacaggcgtgtgccaccacgcctggctaatttttgtatttttagtagagacagggtttcaccgtgttagccaggctggtctcaaactcctgactgattcgccctccttggcctcccaaagtgctgggattacaggcatgagccactgtgcctggtcgcagggttttccatatcggcccaagcagacatcctcattccttgcagatctggagtttattccattgtggagataaacaataatttatgcaactcttttctctactaatagatctctggattctctccaaatgtttgctattacataaatggcagcaatgacaaacctcatatcatctcacacatgtgcaagagtttctgtcatgagattatttggccaaagtatctaagcatttgtaatttttctgaacattatcaaattcttgtccatcctggaggaccaatgtccatatggtagcctccttgcttggcaatacctttggcacacaccatattatctgtcttctgaatttatgcaaatctaatggataaaaattggtatcttggtgtggttttaaattgtacttctcttattatgagagaagctgaatatcttttcaaatgttaaagaaccttttgtgtttcatttttagtgggcattctgatcacacctttgcccaatttattttctgttggattgttgatgtttttattattcatttctagaaactttatatattgaggaaattaaggaatctgatacgaagtgcagacacttccattcccagtttgcttttttttttcttttttaacttatctgttaagggtgtttggccttatttttatgttgtggaattgttattattactattatttgagatgaagtttcattcttgctgcccaggctggagtgcaacggtgcgatctcggctcagcacaacctcctcctcccgagttcaagtgattcccctgcctcagcctcccaagtagctgggattacaggcatgtgccaccacacccggctaatttttgtattttcagtagagatggggtttctccatgttggtcaggctggtctcaaactcccgacatcaggtgatccacctgcctcggcctcccaaagtcctgggattacaggcgtgagccaccataccgggccattattattattttacttttaaatttcaagacacagaaacaaagaacatactgatagcacagtggctcacgcatgtaatcccaacactgggaggtggaggcaagagaatcacttgagtccaggattttgagaccagcctgggcagcatagcaaaaccccatctctacaaaaaattttaaaaaattagcctggtgtggtgtcatgtccttgtagtctcagctactcaggaggttgaagcaagaggatctcttgcatccaggaattagaggctgcagtaagatatgatcgcaccactgcactccagcctgctgagagagacagtccctgtctcaaataaataaataaataaataaaataagaaaagacatacacagactgattctgttaaaacacaaagacaggccggatgcggtggctcacgcctgtaatcccagcactttgggaggccgaggcgggcggatcacgatgtcaggagatcgagaccatcctggttaacatggtgaaaccccatgtctactaaaagtacaaaaaattagccaggcatggtggtgggcgcctgtagtcccagctactcgggaggctgaggcaggagaatggcatgaacccgggaggcggagcttgcagtgagccgagaccacgccaatgcagcaagccgacattgcaccactgcactccagcctgggtgacagagtgagactccgtctcacaaaacacacacacacacacacatacacacacacacacacacaaagacaatgtcaatgctcttttcaaacctctgcagtggtttctcctcttatttagacttttttttttttgagacagggtcttgctctgtcattcagatcgaagtacagtggtgcaatcactcagcctcaacctgctaggctcaagagatcctcccacctcagcctcctgagtagctgggaccacaggtgcgtgccaccatgcctagctaactttttaaacattttttgtagaggggggtctcactatgttgcccaggctggtcttgaactcctggtctcaagcaatccttccaccttggcctctcaaagtgctgggattacaggtgtgagccatgatgtccggcatgcttcccctcttatttagactcagatcaaaactgcatcatctgaccaatgaatatttgtctcaaattatctcccactttttccccatcacctactcattccagcaacactgacttctttgctgtgccgtttcgtctgtctgtctgtctgtctttatctctttttagagacagggtctctctctgtcacccaggctggtgtgcagtggcatgatcatagttcactgcaacctcaaactcctggattcaagtgatccttcagccttggcctcctaaagtgctggtattactggtgtgagccaccacgcctggcctacttgctgtttcttaaactctccaacctcaatacctttgcacttgctgttccctctacatagaatgcttttcccaaatatccacaaggttcccttcctcatttccttcatgcgctcaaataccacctcctccaagaggtcctccaggctcacctcaagatagcacactgtccctttattttcttacgtgttttatttcccatgatctgacatggttctctctcttttttttttccttccttccttctttccttcctccctccctcccttcctcccttccttccttctctttctttcattctaaaaacaaataatcatagaaacgggggtcttgctttattgagcaggctgcttttgaattcctgggctcaagtgatcctcccacctcggcctctcaaagtgctgggattacagacatgagccaccacgcccggcaggcatataccactgtttcttgcttgtctccacccactaaaatgtcagctccatgggcaggggactgttgtctatttgctctacccacatcaccagcaccgtggaaaccaaaaaatgactcaaggagttaaccaagctggcacatcctggcagtacagtccaccctgagaagctcctgacacctcctacctggacaagacagggtacttctctgaccctcagtttcttcatctgtgaaatggaacttgccagggagaaagttatattaagggctggaatgtagtcggggtctaataaattagagcccttaatagttatgttgatggtagccttattccttggtctcctgggtcctgcccggccttccctgggaagctctgagctcaaagccctggaggagggagtaaaaccagaggctgcatctctgcaaggacacatccctgcaagtccacccctcccgcccgcgccttctcggtgcaaactcccgatcccagggaggggaaggcgggcggaatctgagcggcaggcgcagctgctccgggcgggcggccaaggttccctccctcgagcactggcattcctgagggaggggccgagcgcagctgcccgcctggccggaggctcgcttgcgccctctggtgtccaagtacgagaggccacgtggacttgcgcaccagcagccggtctgttctaggccactgtctgcagctcaggtggacctgggtggagctaggtctaccccctacctttcttgggctcccttttcttatccgggttcacgaactcagcttccatcactaaacttgctgtgtgaccctgagcaagacactcaacctccctgtaccacagtttcttagctgtgcaatttgggacaggatcctttacctttttagtgccactttttctttctttctttctttctttctttctttctttctttctttctttcttttctcctttttctttctttctctttcttctttctttttctttctttctttccttctttctctttcttttcattcgtttgttctttctcttcttttctttttctttttctcttctttctctctcttctttctctttctttctttctttctttctttctttttctgttatagagatggggtctcactgtgttgcccaggctggtctcaaactcctgggctcaagcaatcctcctgctttggcctcccaaaatgctgggattacaagagtaagccaccaccctggttgccttcgttttttctttttctttctttctttcttttttaatttttgggacacaatctcactcggtcgcccaggccagagtgcagtggcaggattactgttcactgtagccttgactcctgtgctcaagcgatcctcccacctcaaccccctgagtagttggtgttatgcatgcgtctaattgaagagacaccctgaacaggctaagtgtgagcaacaaggctgtttactcacttttcggctaagtccaaaaagggaatcagcaaagggtggttggagtggaactggttttataggtttggggtaggtagtggaaagttacagttaagggcagtttcttcgggcaggggaagaatgtcacaaggtgcatagtcacgaggtgggaggtcacaaggcacgatatcacaaggttgattgattagttagggcagggcaggagcagatcacaatggtggaatgtcacaaggttggttaataaattaaggcaggaactagctgtttcttctttagtggttctcctgttgctccaggcttcgtgactccagggggcctgtacgtgtggctcacagggatcacaatggctggaccatggtgtagcctgttcagaggaccttacattcctgtctttttatgtttaataatgaaaaataaaatgagaaagaaataaaacgagaaagagtagtgtaatgttgggatgttggggtgaaaattttcgggatggtatggaggggtgatggatgatgttttgggatgatgggtaatgtttctcaggactgcttcaagcggggttaggggcagcatgggaacctaaagttggagagattaaactgaagaaagatcttggtgtagggggtgatattgtgaggttttaggaggagtatttgccgtattgattgattagtaatagcttagatgcaattttgtataaactgagagattagcctgaaaagacaaggtccgatcaagaggaggagaaggatgaaagggcctgttagtggaaggagccttgaagctaggctagagaatggcaaggtaggtccagaataattatttgcctgatttgcaagtttttgagctttgtctttaaattttttgatgttatcatatacgaggccagattgatttaagtaaaagcagcattcttcatttaagaataggcagagtcctccttttccaacagtaagcagattgaggcctcggcgattgtggaggacaactgcacccaaggaatcgacctgggcttggagggcagagagtgtttgagttatatcgataaggctagcagagaagtcattggagagactgagaaaggtagtgatgttgtaaggcctgctactcctgtcccgattgaagcggcagagacttctagtcctacaaacggaattaatggaatgacttttttttgtcgtgctgaggttaagagaggaacgggcagctattcgctaccatttgcaaacttgattttggaagtaaggaaaactagagtacgggttcctgtctgattggcagggaggcacatgtaggtggaaaagccacagagaaaaaagagtccttgaggcatgcaaaactggaagtgcagagtaaaatggtgagagtgtgttttggaagtggggtcctgcacccagacccctagggatccagcaagggcagcagctgttaaaggttgtagtggggtttgatagggtagttgtgtagagggagaggttctgttttcatggaagggtaaaggaacataaggaagatgggaggctccctaagggaattccagtaggtaattgctgggagacgtataagggggcagcaatggggatagtttctgtgtagtgaggggtccaagaacagggggtgtggcattgatataggcagacagctttttttaggtaggtacagaggagagtggcagcttgttgttaaaacatgtcaggggaatttttactgaatttgtctagaaagtaaagaagttgttcgggagggcaaaggtggggggtcactgaaagaggttcggaggtgtagggagatgggggaggttgcccagtcagctggtagggcagggacagctgtgtagtaggaggaagagagggaaatgcatagccaacaatttttggccaaggaaggaacaggatggaggggaggacaatctgattaataaggcgaaggtcttggactagtctgtaggatttatctggcttttgaacaggtagggtgggagagttgtaagcggagttggtaggaactaagaggccatgctgtagtagacaggtaataacaggctttaggccccttaatgcctgttgtgggatggggtattggcattgagcaggataagggtggttaggttttaatgggatgataaggggtgaatggacagttgcaagggaaggagcggaagtatcctacactttaaggttgaggtggggagatgaaaggggaggttgccagggagggttggaattggataaaagggtagctatgagatgtggctgtagtccaggaatagtcagggaggcagataatttagttaaaataccttggcctgataaggggactgggcaggtggggataaccaggaaggaatgcctgaaagagtgttgcccgatttgacaccagagttggggacttttaaggggtttagaaacttggccgtcaatacccacaacagttatgggggcaagagaagcaggctcttgagaagaaggtaatgtggagtgggtagcccccatatcaatcaaagggacggacttaccctccaccgtaagagttgcccaaaactcggtgtccatgatggtccagggggcctccgagacgttcgggcagcgtcagtcttcagccgccaagccgaggagatctgcgaaggagttggtcagggagtttcgggtttgagctccaggagctccggcagtggcgataagagtccgacagtccgacttccagtgagggcccgcacagaccgggcatggcttggaaggaatgccgggctgcgggcattccttggcccatggccaggttttcaacccttgaagcaaggtcctggagcggggatttggacgtcttgaggttcttacacgtaggcggtgcagctggggtttgtcttagggcagaggcaagcctctgcagttctgaaatacgccgctgccaggcagcctcttccctgttattgaacaccttgaaagcgaggttgattaaatcctgttgtgggatttgagggccagactctaatttttgaaatttctttctaatgtcaggaactgactgcgtgataaaatgcatgttaagaataaggcggctgccgggcgcggtggctcacgcctgtaatcccagcactttgagatgccgaggcgggcggatcacgaggtcaggagatcgagaccatcttggctaacacggtgaaaccccgtctttaccaaaaatacaaaaaattagccaggcgtggtggcgggcgcctgtagtcccagctactggggaggctgaggcaggagaatggcgtgaacccgggaggcggagcttgcagtgagcggagatcaggccactgcactccagcctgggcgacagagcgagactccttctcaaaaaagaaaagaaaagaaaaaaaaagaataaggcggacttctggcccttcagggtctagtgctgtatatcgcctgagggtggcagctagatgggccataaactaagctggattttcatatttgttctgagtggtctcttttagtttgtcataactgatgactttatatgcagccttctgaagcccttgagctaggcaagagatcatatagtcccgcctggctatgccttggacccctgcgtggtaggtccactgggggtcttcacggggtacttccctggcacctttttggaggccaggctcaaggcaccagtggtcatcagcataagactgagctagggtccaaactcgctctcgctcctcaggagtgaacgtagaggtgaggatgacgtttaagtcattccagttaagattatagcactgggttaagtatcggaattcttgtatatagttcgtggggtcagacgggaaagagcttaggcgttgactattttgggagagttctgacagggagaaagggacatgaacctggactattccttcggctcctgccacctctcgaaggggaaattgctgggcaggggcagggggaccggccacggggccaaattgtaagccagataaggtgtgaggaggggtggtgatgggaggggcataagggggtgggctgtgggtagaagagggatcaggttctgagggggaattagaacgagttcgggtgggtgagggggagaaatatcagagggattaacagacacagaggaatcggcattgccaatggaaaaaggaggggtagacggaagggagataaggaaaacttgggacaggtcacattgggagcagacggtagggagagatcatagtgtaaaaaaatgcctggacatagggtacctcagaccattagaccattttgtgacagaagttgtctaagtcccgcaaaatagagaaattgaaagtgccgttttctggccactgagggctgttgtctaatttacactggggccaggcatgttacagaaaaaaataaataaacgtttaggctttagattgggtgaaagctgaagaggtttgagatttttgaggacaaaagtcagaggggaagaaggagggatggagggcgggaggttgcccatgatagaagagggaagattggatgggaaagaaagagacaaagaatagagcaaccacagggatcttcggtgggcatcccgaatggaagtcctgggttgtacggctgtgaccaacgctggatttcagaaacacagataaaaggaggttccttgtctgaaagaaaaagagagagagagacgaagagagactgaggcagcttaatcgatctgtaggcaggagtggggtcattttgcaggggtgggtctgaagtcccaaggtggaagggagtctcttcaaggaagagtgcaggggaatgggggtaggtgtcccggaggagatcctctatcccgggctttcagcaccaaatgttctgcgcgcgtctaattgaagaggcaccctgaacaggctaagtgtgagcaacaagactgtttattcactcggatgcaagcgggctgagtccgaaaaaagagtcagtgaagggtgattggagtggaactggttttataggtttggggtagggtagtggaaagttacagttaggggcagttttttcgggcaggggaagaatgtcacaaggtttatagccacaaggtggggggaggtcacaacgtcaattgattagttagggtagggcaggaacatatcacagtggtggaatgttccaaggtcggttaataagttaaggcaggaactagctgtttctttggtggttctcctgttgctccagcctttgtgaccccaggaggctgtacatgtggctcacaggggtcacaatggcttgaccttggcgtagtccgttcagaggaccttacggttgggattacagtcacacacaccactatacccagctaattttaaaaaaaacttttgtagagatagggttggctatgttgcccaggctggtctcgatttcctggtctcaagcgatcctcccggctctgcctccctaagcgctggaattccaggtgtcaacccgagtctggagagttttttcatctgtaaaatggaccagtgatgatccttcattcattagattgctaagagaatttaaacagacagtccaggtgaatgtggctacagtaaaaatatacactccaggctgggcatggtggctcacacctgtaatcccagggctttgggaggccaaggctggaggatcacttgagcccaggagttcaagaccagactgggtaacatagggagacccccgtctttaccaaaaatacaaaaaaattagctgggcatggtggtgcctgcctgtagtcctagctacttgagaggctgaggtgggaggatcacttgagtctaggaagtcaaggctgcagtgagctatgattgtgccactgcactctagcctggatgacagagggagactgtctctaaaaacaaaaaataaaaataaaaattttaaaaatggctcagatggttctacctggcaattcccactgtgtagatggagacactggtactgggagacagggctcagactggaggaaaagaagggaaggactgcggagacaggccctgatgccctttgcctttgggcagttgcctgtcccagactcctgcaatccctgcccccaagagagggaggatgtgaacacctggtgaaggggaacactcacccccagcccaggcagagctaaacagaaccagtggaggccaggcacgatggctcagacctgtaatcctggcactttgggaggccaaggtgggcggattacgtgaggtcaggagtttgagaccagcctggccaacatggtgaaacctcgtctctactaaaaatataaaaattagccggttgtgatggcctgcacctgtaacctcagctacttggggggctaagacaggagaatcacttgaacccaagattgtgccactgcactctagcctaggcaacagagtgagactctgggggaaaaaaaaaaaaaaacagaaccagtggagattcctgagaccctgggacagtaaatagacactaatgttctagaaccttccaaattaactataatttgcttccctgagccaggctttaatttgattctattgagtctttgctctctaaaacatcaacttaaaagcattagctgaagactcactgctcctcagctgcctgacatggggcaaattgtttagcctcttggggcctcaatctcctcatctttgcaatgggtgagaattacttcagcatagctgcaagatgacttcttcttttcttcttcttcttttgaggtagggttacccaggctggagtgcagtggtataatcacagctcactgcagccttgacctcctgggctcaagcaatcctcccacctcagcatcctgagtagctgggactacaggtgtgcactaccacacctggttttttgtttgtttgttcgttcgttttgtaggggcagagtctcactatgttgcctgggctggtctcgaacttctggcctcaaacaatcctcccgcctcagcttcctacagtgccaggattacaggcatgagctaccactcctggcccagctgcaagacttctatcaggggacatagagcacattgaacagtgtctggcacctagtaggtgcttgacaaatgcccaaggaataaataactagatcctactcctccctttgcttctaacatccttggtttcagctctctacaaaggcaggatctaggaaatgggcacacattaagccccaattcatgggagactatgagatttcagtagaaaatgcccttcgtaagtaagtttgcagtaaatgtccacaccacacaggaagggattttgtctgtcatgttcactgctgtgtccccagtatgctaagtaggggccagggtcaaagtaaatgcttgatgaatctttgccggataaatgtatattatctgctggatgcagtggctcatgcctgtaatcccagtactttgggaggcagaagtgggcggatcatgaggtcaggcgtttgagaccagcctggccaacatggtgaaactgcgtctctactaaaaatacaaaaaattagccggatgtggtggtgcacgcctgtaatcccagatactcaggaggctgtggcgggagatggcttgaacctgagaggcaaaggttgcagtgaaccaagatcgcaccactgcactacagcctgggcaacagagtgagatccatctttaaagaaaaagaaaattatattatcatttgatggggggatcagggacccttcaataggcaaaatttcccaagctggctgaattgacatcactgtagggtgcagattcaaacagactcatcatcaagcccaactgcttcttagaggcagacaccacaaagccgtctcaacattctctttaataagcctgctaaacattgagaattatttgaggacagagaaagcctttttccaggaatgcttcaagcatgatgtgtttccttccctggtttaatatgtataatttgccttctggaaaaggaacccagagactctggcatgacttaggaaacaatagacaatggtcacaatttactaagcataactgtctcctgcaaggatgacgaaatccatatagcgcaaggatttgaagcccaagaagaggactttgacctatggatttctcaggaggtttcgttatggtggatcctggagtcagatggtcaaatgccacatgctgctcactcccggaattgggaaatagggaaaaaatgccagcacctcccctgtttgtgcagctgccctgttttgccaatttcacaaaggcaaaagtagggaaaatccatccaggctagggtagaaagatgtttgctctcctcctgccagccaatcccaagcaagccctgagttcagtgtcctgggtgtgcaaagctccttgctggcggaggggaaggctttaggatatgaccttcatggccaggcacagtggctcatgcccgtaatcccagcactttgggaggttgaggcgggtggatcacttgaggtcaggagttcgagaccagcctggccaacgtggtgaaaccctgtctctattaaaaatacaaaaattagtatttttgtactaagtacaaaatgagcttgctggcccatgcgtgtaatccccgctacttgggagactgaggcatgagaattacttgaacgtgggagacagaggttacagtgagctgacattgtgccattgcactccagcctgggtgacagagccagactctgtctcagaaaaaaaggggagaggggcgtggataagaccctcatggctcatgggacaggcagttctcctaccactctggcccccaaggaagcggatggggcacttctcaagcatatcttggaggcttggctgggaagtaagaaacacccccaactccgccccattggatttatagggattcttgccccacacctgtttagatattaactcagccactacaagtcaaggcaaacaggccagggccagggcagacaagaggacagacaagaggacagacatctgcagcctgtggcctcctgtcaccctcccacccaccatggaaatgccctggcccctagggtggattctgcttcttttgggaagccccctcatccacgctgagcctctgtgagtctggggaatggagggggctcagccggcttcctgcacatctgatgtctgcgtgattccagcttatgactcgtgttcggtgtcattttccctactcaagtcccttaatgcccttgtgttagtctactggcaggtacatcctggtgaccccccgagttctgagggttggcagtccggagagcattcacattcaggcccactcagactccagacagcccctcacaaggaccctcaaggtgaacctcacagtgtgggacttccccatgaggaagacagtgttggcaaggagccagctcattctctcaccaggaaacaactttatggaccaggcacctgtgacggtgggtgacaggctggaatgtgtgaccccaaagggaggctacaggtcagcaataaaggtagaaaggggcagactttctgtccagagagtagataaagggcccaaagtacttaccactcctctaatatcctgtgcatttagaagccaaaagtccctaagcctgggctccaggaagcctccactagcccatttgatgcctctctgagaactataaaaggtgccttctgttggtagcttgggaagatgagcatggacttgatttcgtccttcctttggctgggtgctcttgtgcagtgagcaacctacacaactgcacatggcaacctagctcccaaaggcagagtcagaagaccctcagtcaattgctcctcccaggatctgtcccagggctttacccccagccagggagaccccagcagagcctgaggagtatggatatatatctctctcaggttcccgagagcctgatgtacctcccaaaaccagggcagcaatatgtcatcatccgggcaacttgggcacccacctcgggctcctcattcatggagaagatggtgctggtggctcttcatgctggctacatctttatccagacggagaagaccatctacacccctgagtacttgggtacagccccgaggcacttggctcggggcaatcactggctctcatcccgtctctcccaatgtctgagatactcccatcccctaaaatcttctccacctcccaagatctctctctatgcataagtgccccccaccccgccactgcccaagatgcaaactctctctctctctttcccttcctctacccaatactcagagtcctccttctcccctagttcactaccgggtgttcactgtgaaccacaagatggaccctgtgaccaggacattcactctggacatcaaggtggtctttcccgatgaggggtggggggtggtggtggatcctggacactggggttacatggtgtgctgaagtcctgggggcatgagccaccagggccctcccagagggcagtcaccagccccaccccctatccccacagaacccaaagggaatcaccgtgattagccagagtctgatggccaaggatggcttctttttcagctcctttcacctcccagagcttgtcaggtgcccttgtcaggtctgggagcccgaggggtggcaaaggaggctgtcattctctgtctccatctctcttaactttctgtgcctcagtttggggacctggaccatcgaagccagctaccaaagtacacccaagcagaagttcgaggctgcctttgatgtgaaggaatatggtgagaaaggtgtgggtggggtgagcaagatgaatacgccagggacaggacttggaatagaaaggaggtctcaaggggaacctctgctgtaacccagggcctgagctggatgctaagtgttgggtgctggtgttgcagcccttcgggcttgacagagccaccaaggaaggagcaggactgggaggggacgagggagcaggtagaatactgagggtgaccatggcttttttttttctcccagtcctcccatcttttgaggtccagctggtcccaaataagactttcttttacctcaaggatgaggctctgggcgttgacatccaggctcggtgagcccccttcctcccagctctgccagaagaccagggacacaaagattgagtacagagaaacaagcaccaggtgctatggctcacatctgtaatcccagtgctttgggagaccaaggcaggaggatcacttgaggccaggagttctagaccagcctggacaacatggcaaaaccccttctctaccaaaaaaaaaaaaaaaattagccaagctggctgggcatggtggctcacacctgtaatcccagcactttgggaggttgaggtgggtggatcgcctgaggtcaggagttcaagaccagcctggccaacatggcaaaaccctgtctctactaaaaagacaaaaatagccaggcatgttggtgcatgcctgtagtcccaggtactcagggactactgaggtgggagaatcgcttgaacccaggaggcggaggttgcagtgagccgagattgtgtcactgcactctagcctgggtgacagagtgagactctgtctcaaaaaaaaaaaaaaatagccaggagtggtggcacatgcctgttgtcccagttactaggaaggctgaggtgggaggatcgcttgaacccaggaggtagaggttgcagtgagccaagattgtgccactgcactgcagcctgggtgacagagtgagaccccatctcaaaaaagagaaagagagaagcaagccacttctgtagcatttagggtggtagacatactcttctcccacccatgagatattctgggctacctatgttgtcctgtgaggttgtacagaccatgtctgccacctgtgaggttgtataaaccatttcttcaagtctatgaagttgtacaggccaccttgtctacccagtggtgttgtactgcatctcatctcatctgccacttcacagtttagaccatctctgaaagtctatgaggtagtacaggttatgtttgccatcatgagattgtccagaccatctctgcagctctatgtgatggtaaatgacacatttgctgccttgtgttttacagaccatctgcattgctatgaggttgtgcaggcaatgctgtccacctgagattgtatgggctatgtctgccacttctggacattatatgaatcattcctgcagctctaacatgctacacaggccacctagtttccctggtgaggctgcacaggccacttcataggttgcccagacttctttgtggctttatatagtttgaagtccacctccaccatcttgagagattgcctagaccacatctgcaacccatcaaggctttatgggatatattcgtcacctcccagagttgtgtgggtcatcaatgaaaccatctaagtttccaagggccacctctgcccctcccaattttgcacagccatctctgaagcagcatgaggtatgtgggtgcttcagagacagtggaattgtcctccatcccccacgtatatatttaacaagccagtggacggacatgctttggtcatctttggggtgaaattggactcctgccggatccctatccaaagctccctgcagagggtggaggtgactgaatcccagctcctccccaacctccaatccactccactctctaacgctccccaaaaaaccatatcctctcctctatcttaccctaagaacagatctctgaaggcctgggccacgtctccctccagaaggacacgctcatggccgcattccaaggcccaggagaggacttcattggaggctcaatctttgtcaatgtcaccatgttctcctcaggtgccaccctcaccccggcccctgactgaggtcaggacatggtgttcttgcccaatgcagacactccacccatgtgaccttgggccacctcccagcctcagtttcctcattagagaaatgggtggaaggagctgaaatagtgttattgtcgttctctgccttcaccaagatggggctctcatactagtcctgccactcacttaagaaattgaactccctcacaaactctgtgttctcactgtctctacagggggtgagatggtgcaagctgagacctcaggggtgaagatcatccagagcccatacaacatcaagttcaccaggacaccccagtatttcaagccaggaatgcccttccactttcgggtcagagtctggactcactacacccagggactcagggccccctccccaaagcagacttcccacaaagagacaaaaacccacactggactcacctgcatccaactcatctgaaggttgagtctatcatgttccccagactaatcccagagtccccccaaaccttaaccctaaagcacagtgatggctccagaatttctctgtggggacttagaggccacaatcaggctggaagttggtgtttgaaagtttatctagaggctgcatttgcacatcaaagcatggccttttcacatatattaatttggatgggcattaggaaagtcagggatatcctttggcaccaatcctactccaagtctcctataggctctcatgtgtcctccttccctctccactctcagtcttcccactcaccatcagctctgcaacacccaggataaccacatgtggttgtacactgcaaagctctaggaggtgccattcataaaaactccaatatgaatggtgcccccggtgttgtttagtgcaccatgtataaagttgtacaaagcagtcctattcagatcatattccagtctcacctctcacaccaggccactgcaggcttttccttcaccttaccccagattccacctcaggtcttcatctcaaatcctgatgggtccccagcttccagagtccttgtccactcccaagaccaaaaagtgtacacctcagctgaggggttggccactctgaccatcaacacagatgcaaatctggacaagctccccatcgaggtaccaacttgacaaggcaaggagggtgggattagagctgtgtgagttggaagggttggggtttacttgcccatcatcctccctaggtgaaaactgaggaatctcttcagccagaggagcaggcttcagccaagatgacagcttggccttacttgactcaggatgggtcaggaaacttcctacacatcgaagtaaagacattgggcacagaggttggcagcagcatccagctgagcctcaacacaaggcatcaggaccctaaaaccaaggacaagattactcacttcaccatcctggtgaggagctaggaccagggtctgagtcaaggaattctttccttggaaaaaccttggcttgctgagttggagaaactatgaaaaaagatgtgaaggtggcaacaatcttgagtgggctcagatctagaggctgaagaaaagagactatgagcctccattgtgggatgggacagattcagagaaagactggccctcccttctcatccttgacctcccttgtcttcaaggtcctgagtaagggccagaccgtgagtgccaaacatcagtcaaaaagccaggggagtgtctacacatcagccattattgatgtgacttcagcgatgctgccctccttccgcattctggccttttatttacttcccagaggagcaagccaagaccctgagttggtggctgattccatatggattgatgtgaatgacagatgcatagggatggtaagccaaactccttgtagttgtgcatcaccatcataaagccccagaaaggggctgtacaagtttaggcattcccaaactagaagccagggaagagaaggagaatatgtggccttaagagctcaacacaaggtgtggcggtgatgcaagtaaataaatatacggagttgggattagcctagtggagttcccagatgctccaccagagcagtagggaacgtaagcctgaaagtgtagttgtgtggtctatgattccctttttctgacatctctctttttcttggctcagctgaaagttggcttgaagaatgatagattcttccagtctttggagcccaacagccaagtcgaactgaaggtgacaggtgatgcagaagccacagtggggctggtggctgtggacaaggctgtctatgtcttgaacagcaaacacaagctcactcagaagaaggtaagagcatgtgggctttgggccaagatgttgccaggatattctagctggagcctcagcttcttcagccataaagaggacaacatcaatgtaaggattcaaggagatggtgcaaagtctaatgactgaaaggtgataagagctcaaaaaatgggagatagtatgagaattatgatttgagcctgcaattccagtacaccatttctcctttcatggaggagtcatacaggtcccaaatccaggttcctgtcttgacctctaggtctggaatgtggtggaggaacatgacattggctgcacaggaggaagtgggaaagacagatttgctgtgttcaaggatgctggattggacctgaaaatcagcacaggaatggatagcctggcaagctcaggcacaggctttgggggttggggcaagaggagggcagaaatgggtgcagtgctgcctacttggttttagtgtcaaacagatatgggctgtaatccacatcctgtcacttaccatgggccagtcacatttctctctgagtcttgatttctttgtccataaaatagagataataatagaagtaactcacagtgtgttggttaagacagggttagccatgtgtatcaaatatacaaataacagtaggtcaaacaggtagtttatttctcattcagtaacactacagaggtcatcctgggactcggactccttctaggagtccatccatgccaggcagcaagatgaagggaagtggaaaggggaggacacttcttccacatctcattggccagaatatagtcacatggccccacctaagtgcaagagaggctgggaaatgtagtctttattctgtgtgatctatacaatatggaggcttacttgtcacagatgagggatgataatggatttggagacaactaagagtgtattctctcagctataaattgtaatattaataatagttcttatttattacatgccaggtccagtgctaagtatttgtatatgcattatctcattgatagaactatgattatgcccattttacgtcactggggaaattaacacccagagaggttaagtgacttattgaaaatcgcccagcttttaagtgacaagtcttgaatataggaggctgtcagatgaaatgaagtgatgcatataaagtgctggacatacagcaaacacccaataaacatcatcaaggatattgataatgatcttggcggttgttctatcatcattccctctgacccccagactagccctgcccccaggaccctcctcccagccgccatcgccgctccctgaagaggctggagacaaaaaggaatgcaggtcagtgttaaagctgtatgtctccctccatctccccaacttaaggtatccatcagggcttagaacaggacaccaaaaccactcaatgtatttccagcagggagggatctaatagggggagtttggtgcttacaaaatcattagatgggcttttggggtggaagttggaaggctgcttgctgggactcaagatcacccacttcagtcttgcaatccatgaaatatcaggaaactgctgccaatatctctcaaagggctggtaggttgataatcaaacacgaaatcatgcccattacaaaaacacacatagactagagcccacccatcagctaccactgctgcaggaaaaatggtttctgcttctcttctatctcccagatctctcataaaagcatctcagtggctgcatctaatcccattcagaaccctagcagcaagggagtctgggaaatgtagttttcagatgtctagcctctgtggttcaggatggaatgtagacaaaaggagagataggtcttgagtgtcattggacaatatctgactaaactgccatcctgaaggctagaatgtggaccagaagaaaaggctttgagcctggagtcagaggaagatgggaggcagcaccaggtgttagaagcatggattctgaggctggcatggtggctcatgcctgtaaacccagcactttgggaggccaaggcaggtggatcatttgaggtcaggagttcaagaccagcctggccaacatggtgaaaccttgtctctactaaaaatacaaacattagctggctgtggtggtgggaacctgtaatcccagctacatgggaggctgaggcatgagaatcgcttgaacctgagaggcagaggttgcagtgagccaagattgcgccactgcactccagcctgggtgacagcatgagactccatctcaaaaaaaaaaaaatgcagtatggattctggttccacctctgccacttgggagccttgactctaagcaaatgaattcacgtctctgtggctcagcttccttgtcagaatctcaccatgtgagttcaatatgaggcttcagaaagggcacagataaggcactaggcatagaatctaccacagagtaattgctaaatagtggcaaggtgtgcatagcatcaaggtgaatgggtcccagcttcttaggtcctgcccaaccctcctctttccctctgactctggcccacagtgaacaagtttaagacagagctggagcaaaagtgctgtgaggctgggctccgggagagcccagtggggctgtcttgtgaggagaggacctggcatgtccgccatggtccagcctgtgtggctgctttcctggactgctgccatctgtctgagaccctgactcgggaggctcgagaggatcaattgcatctgtggacaagtgagggggctatggcaggagatgcagggtggggggcttcatggagggatatagagtgacatgggacaggttaaggggtgatatgggccatggagggttggaaaggaggactccacaaggagtctgatggaacatggaagaaacatgaaggagactccacctcacacctgctccctccagcggatgaagaagaggacttcgatgacctcttcttggatgacatgcctgtgcggaccttgttccccgagagttggctctggaggaagttcactctgccaaagagtaaatcggggtaagacatcagcctccataccagaatctggtcccaggtccttgcaatcatcagtggatgctggtcagggacaatgaccccagcagtgacatcgagcctcaggacagtcccataattgggaaaacatcttaatggattccctaaaaggatgaccctctagtgaggctgtcactaatgaggtgatctgatgatcctcaatagtgaccataacccctgcatggtgaccccaaatccagaagctctatccagcacaaactcagtgatgttttctcactcacaacagcatctcccattaccccatctctgtgaaggtgccagattccatcaccacgtggcagtttgtggtggtcagcctcaaggctggacaaggtgagccgcagcaagcccagtgccaagggaatgggggtatggtgaccttacccagcccctcccccaacggagcctctgcttaaacccaatgtgctctcctggctgtaggtctctgtgtctcggacccctttgagctgacagttatgaaatcgttctttgtggaccttaagttgccctcctccgtgatcaggaatgagcaggtccagatccaagccatgttgtacaatttcagggatcgccaggccaaggtgaagccccaagccctcaacttcctgccaaaacctctgctagtgtgtatttcattttattttttaatggctttatttcattttatttattttttgagacagagtttgctctgtcacccaggctggagtgcagtggcacgatttcggctcactgcaacctctgcctcctgggttcaagcgattctcctacctcagcttcctgagtagctgggactacaggcgccctgccaccatgcctggctaagttttgtatttttagtagagatggggtttcaccatgttggccaggctggtctcaaactcctaacctcaagtgatccacccgcctcagcctcccaaagtgctgggattacaggcgtgagccaccgcacccagcatattttattttatttttggaaacagaatcttgccttgtcacccaggctggagtgcagtgacgtgatctcggcttgctgcaatctcacctcacaggtgcaagcaattctcgtgcctcagcttccccagtagctgggatcacaggtgtgggccaccatgcctggctaatttttagtattttggttagagacaggattttgccatgttgcccaggctggtctcaaactcctaagctcaagtaatccaccctcctcagcctcccaaagtgttaggattacaggtgtgagccaccgtgtccagcctgttagtgtgttttagaaaaggaaattcagtgtatttttattcctatcggtcagtgaagtggtggctcttttggaaaatctaaggtattctcttatttagccaggcatagtgctgcacacctgcagtttcagctacttgagaggctgaggtgggaggatctcttgagcccagtaggtcaacgctgcagtaagctgtgattgcaccactgcactccagcctgggtgacaaagtgagaccttgtctctacaaaaaatgatcttaaaaaaattagccaggcttgatggcatgcacctgtggtgccagctgctcaggaagctaaagcaggaggatcgattgaacccagcagtttgaggctgcactgagttgtatttggaccactgcactccagcctgggtgacagagtgagaccaagaaagaaagagagaaagggagagagagagagagagagagagagagagagaaaagaagaagaagaagaagaagaagaagaagaagaagaagaagaagaagaagaggaggaggaggaggaggaggaggaggaggaagaggaagaggaagaagaagaggaagaaggaggaggaggaggaaagaaagaaagaaggaaagaaagaaagagagagagggagggagggagaaagagagaaagaaagaaagagaaagaagaaagaaaaagaaagaagaaagagaaagagaaagaaaaagaaagaaaaagaaagaaagaaggaagaagaaagaaagaatgaatgaaagaaagaaaggaaggaaggaaggaaggaaggaaggaaggaaggacggaaaaggagaaaagggggccgggcatggtggttcatgcctgtaatcccagcactttgggaggctgaggcgggcagatcatgaggtcaggagatcgagaccatcctggctaacacggtgaaactccatctctaataaaaataaaaaatttggctgggcgcgatggctcacgcctgtaatcccagcactttgggaggccgaggtgagcggatcacaaggtcaggagatcaagaccatcctggctaacacggtgaaaccccgcctctactaaaaaatacaaaaaattagccgggcgtggtggcgggcgcctgtagtcccagctactcaggaggctgagggcaggagaatggtgtgaacccgggaggcagaacttgcagtgagccgagattgcgccactgcactccagcctgggcgagagtgcgagactccatctcaaaaaaaaaaaaaaaaaattagccgggcatggtggcgggctcctgtagtcccagctatccgggaggctgaggcaggagaatggcatgaacccaggaggtggagcttgcagtgagctgagatcccaccactgcactccagcctgggcgacagtgcgaaactccatcaaaaaaaaaaagaaagaaagaaagagagaaagacagaggaagaaagaaagaagagaaagaagggggggagagagagagagagagagagaaaaagaaagaaagaaagaaagagaaagagagagagaaagaaagaaagaaagaagaaggaaggagggagggagggagagaggaaggaaggaaggaaggaagggaagttaaacctcacaacaaccccatcagatgggtactattattgttcttggtttacagatgaggaaattgaggcacagagaggttaaagggcttgcctggagtcacacagcacataaatggcagatggggctctgactcaggctgggtctgtggtcctcatcactaggctttgctgtcacctacgcaggcatctcagggtggggaggggactgtgaccctagggtcctggaccacaccatacatagataccccatccctttgcccatcctgccctaggtccgagtggagttcccccacaaggagacactgtgcagtgcgtcaaagccaggagcaccatcccaccaggtagtggtcgtgccccccacctcctccaagatagtacactttgtgcttctccctctggagacaggcaaagtggacgtggaggtcaaggctgtgggctacggggtccaggaccatgtgaagaagacactcttggtccgggtaatgggcactcccaactcactagctgctggtgcagacagcggggcttccaccaggtccaggctgggcaggtgggcccaggatcgataagcaaggctcctagatgggagtgaggtgagaaagaacagatttgaaagttcagtcagttggctgggcatggtggctcaagcccgtaatctcagcagtttgggagaccaaggtgggtggatcacctgagggtaggagttcgagaccagcctggccaacatggtgaaactccaactctgctaaaaatacaaaaattagctgggcatggtggtgcacacctggagtcccagctactcgggaggctgaggcaggagaatcgcttaaacctgggaggtggaggatgcagtgagccaagattgcaccactgcactctagcctgggcaacagagcgagactcggtctcaaaaaaaaaaaaaaaagaaagaaagaaaagaaaagaaaaaaagaagaaaaaagtttagtcagtggactgatgtgagggggtcaggtcacaagcccccacttgagagttttggagtcaggcctgggttctaatcttgtctctgctgtgtgaccttgggcaacttacttaacttctctgttctgagcctccatttccttgcttgcaggatgaggataatcatcatatccctgaataaacatagagctgggaaaatgacccagaaccagtgtatggcctatcaaaaacattttattagactgggcttggtggctcatgcctataatcccagcactttgggaggccaaggcaggaagattgcttgagcccacgagtttgagatcagcctgggcaatatagcaagacctctctagaaaaaaattaaaaattagcctgacatggtgttgtgcacctgtagttgcagttactcaggaagctgagggaggattgcttgagcccatgagattgagcctgaagctgagatcacgccactgcactccagcctgggcaacagagcaagaccctctctctaaaaaacaaacaaaaaactttatttgcttaacaaacacatgtttaacacttaagatataaatgcttaagaatattaactcgggccaggtgcggtggctcacacctgtaatcccagcactttgggaggccaaggcgggcggatcatgaggtcaagagatcgagaccatcctggctaacatgttgaaaccccgtctctactaaaaatacaaaaaattagctgagcgtggtggcgggtgcctgtagtcccagctactcaggaggctgaggcaggagaatggcatgaacctgggaggtggagcttgcagtgagccgagatagtgccactgcagtccagcctgggcaacagagcgagactcggtctcaaaaaaaaaaaaaatattaactcagtcaggtgtggtggcaccccgccccccccccccccccccggtattcccagctatttgggaggctgaggtgggaggatcatttgagcctagaaattcgagtccagcctgggcaacctgaagtttttttttctctggaaaaaaaattaactaggccaggcatggtggctcatgcctataatctcagcactttgggaggctgaagcaggtgaatcacttgaggccaggagtccaagcctggccaacatggcaaaaccctatttctactaaaaatacaaaaattagcctgtcttgatggtgtgcacctataattccagctactcaggaggctgaggcatgagaatcccttgaacctgggaggtggaggctgcaatgagctgagatcgtgctactgcctccagcctgagtgacagagtgagaccctatctcaaaaaataataataataactaattcagccctccaaacaaccctatgagtgagggactattcttatccccctttgatatatgagaaaactgaggcagagagagggtaactaattttcccaaggacacacagctaggaagcagaagagctgggattcgaacccaggtatttgggctccagagtctgtgcttatcacagccaagcaatgcctcctctcaccatcactgcgattgtcattctgactgtgattgctgtttttgcttttgacttatatcctcatctcatccctcaggcaggggttcagatccagcaaacgtcctatagcatcgtcctggaaccccaaggtttgtgagatctgcagggggcctgtgagatcctggggctgtgctagggaggaggaagcagttggcatgaggggatatgctcagatagggattctgagccccagccccgggctctgtgcaccctgacttccccagccccagagcccacttgtcacagaaggttgtggttattcaggtcagacccagacaaaactggtgccaagacaggagttcttgaacatggtacccgacacggaggcggaagtgtttatcagtgttcaaggtgctgggggacacagggacatggggagggctgacgctgggttctctaaggtccgtgaggcaccagagcaggaggagccgtgtggggcgatcagtaaaccactgtggcttaagcataggccactcccagggtgacccaactcacccacctgacaggtgacatccttggtgagacaattgtgggcagcctgacacccagtgagattcagcagctgctgcgggtccccacgggctgccctgagcagacgctgagctccctgacgcccgtcatcatcctgtcccgctatttggataccaccggccagtggggcaaggtcggggtggagcacagggaccaggtgatgaagaatattgtcagcggtgagagcggggaccctcctggggcctccaagagggtgcctggggatctcccggagggtggctggggcacccccaggattggggaaatcttcatgggaccccccagcccccgcctcaggcattaacacccaaactatgactccttccccagactacaacctgataccaattccccaacgtcatcccccagctgtgacacacccatgggaattcttcacctgaccactttcccaggctttaatctttttttttttttttttttttttgcaatggagtttcattctgtcacccaggctgaagtgcactggtgtgatcttggctcaccgcaacctccgcctcccaggttcaagccattctgcggcctcagcctcccgagtaactgggattacaggtgcccgccaccatgtctggctaatttttgtatttttacttttatttatttatttattttgagacggactctcactctgtcacccaagctggagtgtagtggcacagtttcggctcactgcaacctccgcctcctgagttcaagtgattctcctgcctcagcctcctgcgtagctgggattacaggtgcccgccaccacactcagctaatttttggatttttagtacagatggggttttgccatgttggccaagctgctctagaactcctgacctcaggtgatccacctgccttggcctccctaagtgctgggattacaggtgtgagccaccgcgccagacctccaggcttcagtcttatgacagacaccctgatttctcccaaaaagccatcctgcgagaggatgttatactcaggccctgccccaggttacaccccctcagtgccactcccagggaaccctagggaacacccaagcagcaaaccccagaataaccccaggcagtgggctcttggttgcacctgtatgctgatacttccccaggttacaaccacacaccctagggagcaaccagagatgaacacccctagtaacacccatagacctctgagttaattggtcccaggttaccctcagactccaactttccctccaggttttctcaagcagtaatcccacaggtaatgtccagatactgtcaccccaatgctccaagcaaacagtaaacctccaggggaacttcaagtaatacccgagtagcgaggctcagaatacacctgaaaggctgggtgtggtggctcacgcctgtaataccagcactttgggaggccagggcaggaggatcacttgagcccaggagtttgagatcagcctgggcaacatagtgagacccccatctgtacaaaaaatttaaaaattggctagatatggtggttcacgcctgcagtctcagctactcaggagcctgaatgggaggattgcttgagccccagagtttgagactagcccgggcaacatagtgagacttcatctctaaaaaaattagcctggtgtggtggcacatgcctgtagtcccagctacttgggaggctgaggtgggaggatagcttgaccagggaagggcgaggcttcagtgagctatgattgtaccactgcactccagcctgggtgacagagtgagacccagtctcaaaaaaataaaaataaataaaaagagggccgggcatggtggctcacacctgtaatcccagcactttcggagaccgaggcaggtggatcacctgaggtcaggagttagagaccaccctggccaacatggtgaaacccagtctctactaaaaatacaaaaattagccaggtgtggtgacgcatgcctgtaatcccagctactcaggaggctgaagctggaaaattgcttgaacccgggaggcggaggttgcagtgagccgagatcacactactgcactccagcctgggcgatagagcaagactccgtctcaaaaaaaaataaaagaaaactcccacgtagcacccctcaagttgccccatctcccaggttgcatgtggacaacaacaccttctatgatttcttccagcagcaactccaagggtagcatgccctgctccagagaccctgaggtgaaggtttcctgggttacacccagagacaactgcatcctgggtccctcaaagtcattcctgagccctgctcctcacttacatctgggccctaaacacccctccaaagtacacctggacaacaggtctccccttctagattacctgtatgtgtgacacccccgtgtcacctctagtccctgcccgccaggttattcctgataacactgactgtccctcaaagccctgctctgtttccccaggctacactcagatgctgacccaccggagttcagacggcacctaccacacctccaaggggaacccaggaagcacttggtgaggatgaccctatctctcctgccactgccaccctggaagcccaagggtccagcctggggtctgatgacccaggagcacccacgctgtagagtcatggggtcttggggtgtccagcgcacggccctggggcattctacactggcagacctgggcagcggcgaatgacaggggtccacctggaatggtgtggaccatggtgtagactcccctatcccagagcccccttgactgcggttcgcaggtgtcacttttgccctctcctgacaggctcacaagctatgtgttccgcgtctttgccctggcctactctatgatgacgacccaagtgcttagcctgtcctctctctgtgacatggccaactggatcatcatcgacaggcaggcagaggatgggcacttcctggagaagggccctgtggtcatgacatccatgcaggtgatcacagccctccctgcctgggccattcaaacaaatccgagggactctgtgcactaagagggggatttcaggctcccaatctgttctcgggcagaatgagaacaggaaagagctgaggctcagcgccaaggatcacatcccccccggtctgaaccacctcatactctgttagaatgtgggtgaggctgggcatatctgggaacccatctcttcttcatccccacatcaagcagtggctcgccctggccctcctccctcaggaactgagtcctccccagcttgcatacccatccccaccaagagtcccctcacaccagcgtccagaaatgtctttcaaatgcagcctggcaggtctctcccctgttcaaacacctgctgtggctcacagctatctttgtctgtatcacctcctaggcctcacctcacccctcccttctcactattcacacttaaccactcacgggctcctccaactctcctccaaaaagcgcttttgctgccctctctgcatgcaccaggccaaattattattattattaattttgagacagagttccactctgtcacccagactggaatgaagtggcatgatctcaactactgcaacctccatctcctgggttcaagcgattcttatgcctcagccacccgagtagctgagattacaggcatttgccaccacatccagctaatttttacatttttgttttagtagctggggtttcaccatgttgtccaggctggtctcaaactcctggcctcaagtgatctgcccacctcggcctcccaaagttctgggattacagacatgagccacggctggagtgcagtagcatgatctcggctcactgcaacctctgcctcctgggttcagcctattgttattatttttagggacaggatcttgctctgtcgcccaggctggaatgcagtagcttaatcatggctcattacagcctcaaacttctgagctcaagagatctccctgccttagcctcctcagtggctgggactacagatgcacaccaccattcctggctaattttttttttttttttttgagatggagtcttgctctgttgcccaggctggagtgcaatggcgcaatctcggctcactgcaacctctgcctcccgggttcaagtgattctcctgcctcagctccccaagtagttgggactacaggcacacaccaccatgcccggctaatttttgtagttttaatagagatggggtttcaccatgttgaccaggctggtcttgaactcctgacctcaggtgatctgcccatcttggcctcccaaagtgctgggattacaggcatgagccatcacccctagcactgacatgatcttctttttttttgagacggagtcttgctctgtcgcccaggctgcagtacagtagcacgatctcagctcactgcaacctccgcctcctgggtttgagcgattcttctgcctcagcctcctgagtaactgggactacaggcaagtgccaccatgtccagctactttttgtatttttagtagagacagggtttcaccatattggccaggctggtctcgaactcctgacctcgtgatccatccccccacccccccggaaccccgccccttggcctcccaaagtgctgggattacaggtgtgaaccacagcacccggattttttttttttttttttgaaacagagtcttgctctgtcgcccaggctagagtgcagtgatgcaatctcagctcactgcaacctccgcctcccaagttcaagcgattcttctgcctcagcctcccgagtagctggaactacaggcttgtgccaccacgcccagctaattttttgtatttttagtagagatggggcttcatcctgttagccaggatggtctcgatgtcctgacctcatgatccacccgcctcagcctcccaaagtgctgggattacagacgtgagccaccacgcccagccgacatgaccttataaggacaccagttattagacttagggtccaccctaatccagtatgaccttttcttaattttaattacatcctcaaagacccaatttccaaataagatcacatcttgaggtcccaggtgaacatgaattttggggtcactattcaagtccagagaggggaagagggtggaagccagggtactaaagtggtgtttggaccctgagttggccattttctagcaatgggaagactttgccactctgacctctgttttctcatcagtaaaatggggctgctgctagaatgctctgagatggtctacagagctcagcttcttgtgttgatagctttttgtttgtttatttgttttgttttgttgtttttgagacagtctcgctctgtcgtccaggctggaatgcaacggtgtgatctcagctcactgcaacttctgcttcccgggttcaagcgattctcctgcctcagcctccccagtaactgggcttacaggcacccacatcatgcccagctaatttttgtatttttgtagggacagggtttcaccatgttggccaggctggtctcaaactcctgacctctggtgatcctcctgccacggcctcccaaagtgctgggattataggcatgagccactgcgcctggccgatatcttttgttagtagggcagaccccagggaggcaaacctctcctctctgtcttcatcccacctccaccatcatccagcccagagctgggtacctggaaacttctcagggtcagacaggagaggctgaggaaggcatctccaagacgctgagggaatcacagatggaactctgcatccacaggatggctaccaaggctccgaggaggatgtatccctcacagctcttgtcctaatagccctgaatgagggaaaggagttgtgcagacagaaggtaggaccccagagaggagggcaggatctgtaaggtcctctagccccagcatctggaaagctcccccaccctcacatccctctgggtccctctaactcccagacttctttcctctgatcatctccctctggcccctccctctggccctctagaatttgatggccagcatcgagagagcccgtggcttcctggagagaaaacttcccgacattcagacaacctttgccgtagccatagcctcctatgcactggcccttgccaacagctcccaagccaacgactgcctggacagctttgccagccctagtgggtgtgggatgcttcttaatcaacctcagtcatggagtggggagggggtgatctcaaatccagcaatgtgttattcatcacttagtgtttcctgagcatccactgtgtatcacctcctgagctcagaccctgtgagaccaaggtgagcaacactggtaagttccctgccctcaagggtcccaccgtccttggaagagacaatcagaaggtcactatataattccaaactgaggcttggagcagcggctcacgcctgtaatcccagtactttgggaagccgaggcaggtggatcacccttggtcaggagctcgaaacaagcctggccaacatggtgaaacctcgtctctattaaaaatgtaaaaattagctgggcgtggtggtgggtgcctgtaatcccagctacttgggaggctgaggcaggagaatcgcttgaagccaggaggcagaggttgcagtgagccaagatcacaccactgcactccaccctgggtgacagagggaggctctatctcaaaataataataataattccaaaatgagacaagcactgagatgataacacacaaggtgggtgggagagatggcaaggggaggggagtacaggttggagggctgagatgaaagatggaaagacatacctgctaggtgtgatggctcatgcctgtaatcccagctacttgggagtctgagacaggaggatttcttgaggccaggagctcgagaccaatctgggcaacatagtgagaccccatctataaaaaaagtttgcaattagctgggtgtggtggtgcgcacctgtagtcccagctagtagggaggctgaggcaggaggatcacttgagtccagaaagccaaggctgcagtgagctgtgatcatcccactgcactccagcctgggcaatagaccaagactctgtctctattaaaaaaaaataaaaaaataaaaaataaaaaatagaaacttttttttttgggacggagtctggctctgttgctcaggctggagtgcagtggcacgatcttggctcactgcaacctccatcacccgggttcaagcgattcttctgcctcagcctcccaagtagctgagattgcaggcatccaccgctgcgcctggctaatttttgtatttttagtagagacggggtttcaccattttggccaggctggtctcaaactcctgatctcaggtgatctgcccacctcggcctcccaaagggctgggattacaggcatgagccaccgtgcccggccaaaaaaaaattatttatttatttttttatttattttgagacggagtctcgcactgtcccccaggctggagtgcagtggtgcgacctcggctcactggaagctctgcctctcggcttcatgcccttctcctgcctcagcctcccgagtagctgggactacaggcgcccgccatgacgcccggctaattttttgtatttttagtagagacggggtttcaccgtgttagccaggatggtctcgacctcctgatctccacccatctcggcctcctaagggctgagactacaggtttgagccaccgtgcccggccaaaaaaaaaaaaaaaaaaaaaccctttttaaggcacaccttcatgaaaggccatggacatttcaagcaaagggaacagcacaggcaaacaccctgaagtggaaagagtgcttggtgttgtcaaggatggaaaggttataaaaccttcccatgggccgggcgcggtggctcatgcctgtaatcccagcactttgggaggccaaggcgggcagatcacttgatgtcaggagtttgagacaagcctgctcaacatgacgaaaacccgtctctactaaacatacaaaaaaaatcagccggtcgtggtggcacatgcctgtaatcccacctactcgggaggctgaggcaggaaaatcacttgaacacgggaggtggagtttgcagtgaaccaagatggcgccactgcactccagcctgggcaacagagtgggactccatctcaaaataaataaataaataaataaataaaaatttaaaaaaaatcccatggctgatgctatctcatccccaagggtccatatcccatcttccccattctgcaagtcaagcaaagtggaactaggaaaatttgcttgcaatgggactggagggacctgaaggaattttttttttttttttttgtcatccaggctggactgcaatggcacaatctcagctcactgcaacctccacctcccaggttcaagtgattctcctgcctcagtctcctgagtagctgggattacaggcacccaccaccacacctggctaatttttttgtatttttagtacagacagggtttcaccatgttgaccaggctggtctcgaactcctgacctcaggtgatccgcctgccttggcctcccaaagttctgagattacaggtgtgagccaccgcgcccagccaggaactttttttttgaaactcaatttcccgatcggaaaatagagtcccgtttcccagggtcattctgaaaattggatgtccacgtttcctcagcaaagagcttcacataaagtaggtgatcaggactgggcatggtggctcacgcctgtaatcccaacactttaggaggtcgaggtgagagaatggcttgaagcctcccggcctcaagaccagcttcgacaacataatgagaacccccccaacccccactcccccatctctacaaaaaataaaaataaagtaggtgatcaataagatggcagatgagaaaactgggccagatgacacaaagagagggcaggttaaggtgggtgggcccagctctgggtgacaaggcgggcgtccctgtttctagacaaaacccactggccagtggatgagcagaatctgggctccctgtacaccattgaggccacagcctatgggctcatgcagaagctggagctgggccggtacaatgagacacacgccatagccaagtggctactagagaagcaggagctgggaggaggcttcaggtccacccaggtgatggggacccccgggaggtgagggccagagtcactagccgaagtgctgactcgcccagcccgacgggggagtgtgtgtgtgtgtgtgtgtggggggggggggctgtccgtggtgctgacacgccggccgatggtttctcgagtgctgtctgtggtactgatccacgttcccccacctccccgccccattccaacactcagaccacggtggtggcccttgaagctctgacccgcttccgcgaagctgtccccttcaagggcatccaggatctccacgtccagatcagagcccccaagacagccctgaatgtgaattggtacattgatcacagcaatgcctaccaacagcggtcagcaaaggtatgtcactgaggggcaggccagagtccacgcagagatggcactggagatgaggccaagcatcatgtccctgctgatctccctcctcaagacatacctcaagatatgtggctatactgtcaatgtattgattcatctattccatcaacatttcctgagcatctactatgtatcagcgactctcctaggcattggggttatgttatgaaagatccatggtccctgttcttatggaatctagaagagtccctaagatctagaagaaaatgggccagatgccatggcttacgcctgtaatcccagcactttgggaggccgaggtgggtggatcatctgaggtcaggagttcgagaccagcctggtcaacatagtgaaactccatcctactaaaaatacaaaaattactcgggcatggtggtgcatgcctgtaatcccagctactcgggaggctgagacaggagactcacttgaacccagaaggaggaggttgtagttacctgagattgcacctgagtgacatagtgaaactccatctcaaaataaaaataacaataaataaataaatgaaaagaaatgtcaccctgggcaacatagcgagactccatctctactaaaaaagaaaagaagaagtaaatcaactcatctaagctcatgcattgtttagtggatgtccctggataaatagttgtcaaaatgaagaaagcagagggaggggaagagtgtttctttttattgttgttgttgttgttgagacagagtctcactcagtcacccaggctggagtgcagtgacgtgatcttgcctcaccgaaacctccatctcccgggttcaagcgattctcccgcatcagcctccccagtagctgggattacaggcacgcaccaccagcccagctaatttttgtagttttagtagagatggggtttcaccatggtggccaggctggtctcgaaatcctagcctcatgtgacctgcccacctcggcctcccaaattgcagggattacaggcatgagccaccacgcctagccaaggaagagtgtttctgacatagggaacagcatagagtgcagacccggagccagtcaggcacaggaatggtcagaagggagaacagcaaataaagcaggctattaggaggcttgcaggctggcagagctcagcagtgagggctgggaggccatggcaagaattaggacttatcctataggcgataatatttgatcctataggcaatgagatttgagtgattgtgactttttttctttctttctttctttttttgttgttgttgttttttgttttttagagacagggtcccactctgttgcccaggctggagtgcagtggcacaaacatagttcacggcagactcgaattcttgggctcaagcgatcctcctgccttagcctcctgagtagctgggactggacatgcattgcaatgcccgacttaattttcaatttttttggtagagatggggtctagctaaattgcccaggcatgttttgaactcctgggctcaagcaatcctccccacttggcgtcccacactgctgggattacaggcatgagccactatgtttggcttggctgtgaatttttaaaattttattctggctgatacaagtagactataatgaggaaaacaagagtagctgcagatgaagatagagattagattggtggttgccagaggataggaagtgtacaaagaaagggagggatgaaaagaagttgattaatgggtacaagcatacggttcgatagaggaaataagaccgagtgtttgatagattcataggatgaatatagtttacaataatctattgcatatttcataatagctggaagaaaagaattagaatgattttagcataaagaaaagacaaatatttaaggtgatggatatctgaggtacactgatctgatctttacacattatatgagtgcattagattatcacacgtgccttgaaactatgtacatccattatgcatcaatttttgttttttgagatggagtctcactctgtcgcccaggctggagtgcagtggcacaatctcagctcactgcaggctccgcttcctggggtcaagcgattctcctgcctcagcctcccgagtagctgggattacaggcgcctgcctccatgctcacctaatttttgtattttttagtagagacggggttccaccatgttggccaggctgctcgaactcctgaccttaggtggtccacccgcctcggcctcccaaagtgctgggattacaggcatgagctactgcacccagcccattatgcatcaattttaaaaggcaaagaaaaataaagagaggtgcagaggtgccagtgagaaggggctcatgggagctccatgcacagggaaccttggaaatgctccaaagagaacagattccagggatgcacattaggacacagcctgaactgagccgtgcagatgatctgacgtcaggagttcgagaccagcctggcaaacatgctgaaaccccatctctacgggcgtgacagcacaagcctgtagtcccaactactcgggagactgaggcaggtcaggagaattgcttgaacccaggaggcagaagttgcagtgagccaggatcacgccactgtactccagcctggacaacaaaatgagactctgtctaaaaaaaaaaaaaaaaagacagccttagactggacatggcagctcacgcctgtaatcccaacactgggagtccaaagcgggtggatcacttgaggtcaggagttcaagaccagcataaggaacatagttagatcttgtcactacaaaaaaatacaaaaaaaaaaaaattagccaggcatggtggcacacacttgtagttccagctacttgggaggctaagacaggaggattgcttgagcccaggaggcagagcgcaccaaagtgagccaagatcgcaccactgtactccaatctgggctacagactgagacctggtctcaaaaaaaaaaaaaatacacaggctggatgagcagttccagttgatctatgatagtgtagacaccacaaatgctctctgaagagggaaaagcaaaaccatctgcgtggagagagatggaaaatgaatcaccaggtcccaggttagggaaaaccgaggccctggtgagtgttcaggctccacatccccctacacttgaccctcactttgctgcttcctccacccttaaatcttcctctttgttctcttcagttccttgcccaggacgacctagagatcaaagccagtggcaacgggagaggcaccatctcggtaggtcttgtattctactgtattagtctgtttaggctgctacaacaaaatagactgtgtggcttataaacaacagaaattggcccagcatggtggctcatgcctgcaatcccagcattttgagaggcccaggcaggagaatcacttgagtccaggagttcgagatgcaccagggcaacagagtgagactctgtctttacaaaaaattgaaaaattagatgggcatggtggcacatgtctatagtcacagctactcaagaggctgaggtgggaggattgcttgagtccaggaggtggaagccgcagtgagtcgtgatcaagaccttgcattctaccctaaatgacagagtgagactctatctcaaaggaaggaaggaaaagaaagagaagaaagaaaagaaaggaaagcaagaaagcaagaaacaaagactcggtgcagtggcttggctgggcatggtggctcacgcctgtaatcctagcactttgggaggccgaagagggaagatcacctaaggtcaggagttcgagaccagcctggccaacatggtgaaaccctgtctctactaaaaatacaaaagttaaccaggcatggtggcggtcacctgtagtcccagctacatgggaggctgagacaggagaatcacttgaacacagaaggcagaggccaagattgagccattgcaccctagcgtgggtgaccagagcaaaactctgtcagaaagaaagaagaaagaaaagaaagagagagagagagagagagagaaaagaagaaagaaagaaaggagaaagaaagaaaaagtgagaaagaggaaagaaagaaagaagaaaaagaaagaaagaaagaaaggagaaagaaagagagagaaatttattgctcacagttctggaggctgggaagtccaagataaaggcagggtacactctctgtttcaggccgggtgtggtggctcatgcctgtaatcccagcactttgggaggccgaggcaggcagatcacaaggtcaggagatccagaccatcctggctaacgcggtgaaaccctgtctctactaaaaatacaaaaaattagccaggcgtggcggcatgtgcctgtattcccagctgctggggaggctgaggcaggagaatggcctgaacccaggaggtggagcttgcagggagccgagatcgcaccactgcactccagcctgggcaacagagcaagactctgtctcaaaataaataaataaataaaataaaataaataagtaatctattatactcatattattatttatttataacctaaataaataaatataggccagtcagtgtgattcatgcctgtaatcccagcactttgggaggctgagtgctgggatgacgtccatgactttttttttttttttttgagatggaatctggctctgtcacccaggctggagtgcagtggcacaatctcggctgactgcaacctctgcctcccaggttcacgtgattctcctgcctcagcttcctgagtagctgggactacaggtgcacagcagcatgcccagctaattttttgtatttttagtagagacggggtttcaccacattggccaggctggtctcaaactcctgacctgaagtaatctgtccgccttggcctcccaaagtgctgggattacaggcatgagccaccatgcccagcctgacgtccatgacatcttccagccccatgacgtatacccgggaggacagctcttttgttaaccaaaaggtggcctggtgtcgtgttccagacaatggagtcatggctgaatctctgcctttgttatgtgaccctgagcaagtcatacctttcttcaagcctctgtgaaatctaagtttaaatgggttaaaattaaacaaaattcaaaattcagtttctccgtcgagctagccgcatttcaagtgtttggtagccacatgtggctaatggctgccatactggacaatgccaattgggaccatttccgtcactgcagaaagttctatgacacagagctggtctagactccagacactgctctggccactgcacctaggaattgatggggtcggtgggggcaatcttgcagtaaattccccacatggccagagacctgggaagtcaaggattggggtgcagaggaaaggcagtgggtggggaagggctctgacagccccctttcctggcccggcagatcctgacaatgtatcacaagtccccagagtcccgggaggacaactgcaacctgtaccacctgaatgcgactctccacagtgccctagaaggtaagcctggtgtggctacaggaggagtaagggtagagttttaggagaagaagttggaaaggtgatgggggaagatggtgtagggacttgttagccacagtgaggactttggcttttgttctgagtcaggtggggcatagaaagttcccaacggaggaggagtgtgacctggcacaggtctgcacaggctccctctgatctgaccactctagagggtgagggtgggagccaggtgaccaggaaggtgactgcactggtcctgcaggagatgatggaggccgggccagattaggggctctggagatgatcagatattagtgggccgggcacagtgactcatgcctgttattccaacactttgggaggctgaggcaggaggatcacttgagctcaggagttcaagaccagcctgggtagcatagtgaaactccatctctacaaaaaattagctgggcatggtgatgcatgcttgcggttccagctactcaggaagttgaggcgggaggatcatttgagcccgggtggaggctgcagtgaaccatgattgtgccattgcactgtagcctgggcaacagagtgagaacctctttcaaaagaaaaaaaaaacaaaaacagagaaatagttggattccacagttcccagcctggggcaccaagaaggagagaggactattgggagctcactgtgggagtaagaggaacaaccctcaccagtcccatgaattttagggactaaacctcaccaaggttttggtttttgcttgatctcttaataataataacaataataataatagttacaaagcactgatcaggcaccatgctgagggctttacttgtattaacttatttaatcctcacatcaatcctgttgggttgggaatattatgatccccccttaaggatgagtaaactgaagcagagagaagttaagcaacttgctcaaagtcacacagcagagtcaggatttgaatccaagatgctagctccagagactgtgcacttgattactgtgctccccagcctctaaactgctgccttctctctgcagaaaataaaaagggaggtgagacttttcggctccggatggaaacaaggtcagcgcaccaggatcttgaactgggagggaggagggtctcactttccggtatctagattccttagcggccttccccgtgtactgagtggacagtgggaaccagccaagcttgcctctccatgcctgtcccccattctgtacctgcctccttccatgtctgcatgtcctcatatgacaggctctacctcagctgacatgctccatgactcagatgcccagagctggctccaagccctgaagctctccccgtggttctcattttctccgaacatcccagcccccaccccagtcctgccctgtcccatacctcccttgcccaggtctgcttcagatagaaacattattgggcacctactgtgtgccagaccctgttcttggagctagggacccagctatgagcaaggcagcctctccctgccctggcgaagcccacagtctatcaggagacacacacaatcatcaaataatcacacagaaccaataatgaaatggcagtggtgatttcatgtggcaaaggagaggtttacagagtcatgagaggcaaatcagagaatgatctgggcctggtgcggtggctcatgcctgtaatcccagcactttgggaagccaagaggatcacttgagcccaggagtttgaggccagcctgggcaacacagcaagacctcatctctaaaaaaaaaaattcaaaaattagctaagggtggtaatgcatgtctatagtcccagctactcatgagcctgagactggaggatcacttgagcccaggaagctgaggctacagtgagccatgattgagccactgcactccagcctgggtgaccctgtctaaaaaaaaaaaaaaaatgatttggtgtgtggggtgtaggttggggaaggcttcccagagggagtgatgtatccgctgagatggaaaacatgaggggtgtttcaggatgaagaggcagaaacgaagattccaggctgagtgaacagcatgtgcaaaagtctggtggcaggacagggaacaaggctaacagtgatcaaatggaggctgaggtgggaggaggtgatgtggaagggtgtcaggattgaggcaaggcatttggtaattgaagcaacgaggcaaggtagtcagatttctgcttgctaaagctctgtgttgtgagtggcaaaggggacatggggagacctggaaggaggctactgcgctggtccaagccagagacaacagcagtggggagcatggagagagaggcgggaggatagtggggaaagactggggctgtgaacttccaggttccagaacaattgagaggccacaatgactatcatggaggtctccctgctcacgggcttctaccccaaccaggatgacctcaaacaggtaatgcagaccccacctacctgcttcctgagcaaccttcccatacttcccacatgggtgcagggcagtgtctactcaaagcaaggcttctgggttaatgccccatcgttacttctctgcatggccaaaaccaaacttttccctggttgggcctcagtttcccctagcatggggttgattggacaaaggctggagctctagggctacgggccttggagactgtcagccaccctccagtctccaccctctgccccagctcacgagtgatgtggagaggtacgcctttcagtacaaaaccaagacaagtaccagcgacagcactgttgtcctctacctggaaaaggtgagaggggccgggtgccctccgccagaggtgtgtgggtaccctgggggctggagaacccaaggtcggtcccctgggtgggttttgcagagagccaggccctctcaggtcagctcctccagttgcgatccctgtggtcaaggccacatggtccgtggtcatggccaatgccaacagccaaggcctcgtggtcagtgccacaaggtcagtgccccagtcagtggccctggccggctcagacaggactctgttctctccagctctcccatgagaagaacacggtgctgggctttcgggttcacaggatgctgcaggcggagttcctgcaggccgccctggtcaccatctacgactactacgagccttgtaaggaggggcccccgtgcatggggatgaggcctgcaaaggacagagccaggtgccaggcgaggagagaccgggcattgcgaaaagggggctgggcctggctagacataaggggcgaggtcttattggattgacctaggttggcggggacaggaaggagatggggcaaagttgaagggggactgggcgtggcctgctgggaatggatggggaaggggcaggctcttttgagtgggcgtggcctgttgacagaggtggctggccagggcccttcaaagtgaggtttgtagggggcagggccaggaagaggggaaggtctgggaggacctggagggcgcagcccagggacaaggaggggcaggagggagcctggactttggaggatggggaaggcaggccagggcccggagtgggtgaagacttctcaggactaggccaggtaggcaacgaacccccaggaacactggcccaagacaacgccctcccccaacccctgcaccctccatccacagcccggaggtgcagcactttctacaacctgcccacagagcaatcttccctgagaaagatctgccacaaagacatctgcagatgtgcagagggtgagatgtgccgagggtgagccccatgccaccaggctggggctgccaggttgtggggggcggatccaggagcccttcaagcctcctcctggctgtagtctggcctgagtttagacagaaagagaaagagacagaggcagaggcaaagagagacagaaagaaggcacagagagacaaagcttgtcacacacacatactcgcactgccaaagatcaaatgacacggagacagagagaaagacacaaagagacgaagacgggagaaatagacaagaaagtgaccaaaaagagagacagacactgggcatggtggctcatgcctgtaatcccagcactttgggaggccaaggcgggaggatggcttgaggccagaagttccagacaagcctgggcaacacagtgagaccccatctctaccaaaaaatttttttaaaaaattagccaggagtggtggtaagtacccgtagtcccaaatacttgggcggctgaggcggaaggatcaggagttggagactgtagtgagctatgcttgtgccactgcactccagccagggtgatacaacaagaccttgtctcaaaaataaatttaaaaagccgggctcagtggcttacacctgtaatcccagcattttgggggccaaggtgggtggatcacttgaggtcaggagtttgagaccagcttggccaacatggtgaaactccatctctactgaaaatacaaaaattagctgagtgtggtggtgcatgcctgtagtcccagctactcaggagaccgaggcatgagaattgcttgaacctgggaggtggaggttgcagtgagctgagatcacagtgcattccagccagggcaacagcacgagactctgtctcaaaaaataaataaataaataggccaggtatgatggctcacacctgttgtcccaacactttgggaggccgaggtgagaggattgcttcagcccaggagtttgagaccagcctgggcaacatagtgagagaccccaactcttaaaaatataataataataagagagagagagaagaaaaagaaaggaaggaggaaggaaaaagaaaagaaaaagagagagagagagacagagagagagccccacagaccagaagggccagatccggagacccaggcctgggggctgaagggagggagggtggggggtgattgggaggaagtgccctgtcccagcaccgccagagcagctgccctcctgaccctgcaggacagtgcccatccctgcagaagcccagtggccaattgaggcaggaggagctccagacaacagcatgtgaggcaggcgtggattttggtgagtgtggggagccacaggggacaggcagagcccacctgcaggccgaatgccaacatgacaccctccccttccccagtgtacaagacaaagctggaatctgtggaggtctctgcctccaacccttacgtctattacaacacgcagctcgaagacatcattaagagtggtatgtcccaggtgacaaagaaggaatcccagtgtggggtcaccctgggggcccaccctgggggtcccattgtgtgggagggtcagacctgtgtatgtgcacacaccgggttttctccaggtacggaccctgccacacccctggccatgaagaaattcgtctcccatgccacttgccatgactccctggggttgcaagaacaggaatcgtacctcatcatgggccagacgtcagacctgtggagaatcaaatctgagtgcgtgaggggttccacctgtcctggggactcaggcctgggccttcttgcctaccctcaacccagccctcagttccacaatttttgctggagatttcaagcaattctcctgcctcagcctcccaagtagtagctgggactacatgcgtgtgtcaccacactgggctaattttcgtattttcagtagagacagggtttcatcatgttggccaggctggtcttaaaactcctggcctcaagtgatccacccacctcggcctcccaaaatcacggggttgcaggcgtgagccaccgcacccggccagggaagcatttactaattcccagtgatttggactaagaggctggaagatcagagagggccctcgggtgtggacactacaggctaaggctctggcaggctgtcagacagggcagggaggtccccatatccccaggggcaccaggctctcctcaccttcttgcttcttgtaacccacagttacagctatgttctgggcaaggagacgttcctcatcctttggccagcagatggagatgccagcaagaaagaattgcgggaccaactggaggaatttttggaatatatgcgcacccacggctgccagtcctgagcctcttctgctttcagggaggtgtcatcaggcagctctgggccactgggtttaaccccaaataaagagcacaggatatgacacccaaaccctggacatttgtccctgtgtcagctttcaccaggggacctgcacaacctgctctggcataatgtggacctgtctcctccctcttcccctgctacttgggcggctgaggcaggaggatcacttgggagctggctctccaagagtcaatattccaagagaaggagcagagggagccatagtaccttttatgacctagcctcaggggtcacatgccatcatttctgcaacgtcctattggtcacatgagccagtattattcagcatgggtggagactacacaaggcatgaccactaggaggcagggttcactaggggaataaatttcagcaggccatggtatccaatccatttaatgtgctgctggatttggtttgttaacattttgttgaggatttttgcatctatattcataaggaatattggtctgtagttttctcttcttgtggtatcagtgtctggaatgctggccccatagagtgtaaaagaaattaagaaatattcttgggagccatggtggctcaggcctgttgtcctggtgcacaaggaggcaaggctagaagtttgaggccaacctgggcaatataaaaacctctcgtctatataacaacaacaataaaaaaactagccagcacagtggctcacgcctgtaatcccaacactttgggaggctgaggcaggcagatcacctgaggttgggaattcgagaccaagctgaccaacatggagaaaccctgtctctacttaaaatacaaaaaaataagccaggtgtggtgatttgcctgtaatcccagctactcgagaggctgaggcaggagaatcacttgaaccccggaggcagaggttggagcgagccaagattgtgccattgcactccagtctgggcaacaagggcgaaattctgtctcaaaacaaaaggcccagcacagtggctcacgctcacgcctgtaatcccagcatttgggaggccaaggcaggcagatcacgaggtcaggagatcgagaccatcctgtctaacatggtgaaaccccttctctactaaaaatacaaaaaaattagccagacgtggtggcgggtgcctatagtcccaactactcgggaggctgaggcaggagaatggtgtgaacccaggaggcagagcttgcagcgagccgagatcgcaccactgcactccagcctgggcgacagagcgagactccgtctcaaaaaaaaaaaaaaaagaaaaagaaaagaaagaaagaaagaaagaattttctcctcttcctgagcatgatggttcacacctgtagtcacagcactttgggaggctgagtcaggcagattgcttgagtccaagagttccaaaccagcctgggcaacatggaaaaaccctgtgtctaccaaaaaatacaacaattagccaggcttggtggtatgtgcctatagtcccagctactttgcaggctgaggtgggaggatggattgaccctggaaggttgaggctgcagtgaactctgttcacaccacagcattccagcttcagtgtgacaatgagaccctgtctcaaaaaaaaaaaaaatccctcttccagtctgggcaacacagcatgaccccgtctcaaattaaaactttaaaaaatattggccgggcatagtggctcacacctgtaatcccagcactttgggaggctgaggcaggcggatcacctgaggtcacgagttggagaccagcctgaccaacatggagagagcccgtctctactaaaaataaaaaactagccgggcatggtggcacatgcctgtaatcccacctactagggaggctgaggcaggagaatcgcttgaacccgggaggcggaggttgcggtgagccgagatcgcaccattgcactccagcctaggcaacaagagtgaaaccccgtctcaaaaaaaaaaaaagaaagaaacaaaaagaaaaaagctgggcatgatagcacacaccagtagttccagctactcaggaggctgaggtgtgtggattccttgagcccaggagacacaggcagctgcaatgagctatgaccaggccactgcactccagcttgtgcaacagagaaaagccctgtatccaagaaaagaagagagacagacagagagagagagagagagagagagagagagagagaccaggtggagtggctcactcctgtaatcccaacattttgggaggctgaggcaggaggacaacttgagtccaggaattcgagactaacctgggcaacaaagtgagaccctgtctctacaaaaaaatcaagaaattagctggatgtggtggtgtgtgcctgtagtcccagctacatgggaggcaggaggattgcttgagcccagaaggtcaaggctgcagtaaatcattcacaccactgcactccagcctgggcagcagactgagaccctgtcgaaaaggaaagggatgggacaagacgggacaggacaggacgggacgggatggaatgggacgggacgggaagggaagggaagggaaggggagaagaagaagaagaagaaggagaagaagaaggagaaggagagagaagagaaaagagaagagaagagaagagaagaaggaggaggaggagaggaaggaaggaaggaaggaaggaaagaaggagggagggaaggaggcagggagggaaggaaggaaggagggagggaaggaaggaaggaatgttccttcctcttctatttgttggaagcatttgaaaagaatgtgtacttaacttattggtagacttcatcactgaaatcattcagtcatgaccttttcttgtttggaggtttttgattactaattctagttcttattacagatctgttgagattttctatttcttcttgagttagttttatgtatttctagaaatttgttcatccagatagattatctgatttgttggtgaataattgttcatagcattctcttataatcctttaaatttctgtaaggtcagtagtaatgcctctattttcatttctaattttagttatttgcacctttttttcctttgtcagtattgctaaaggtttgtcaattttctttatctttttgaagaaccaacttttggtttccttgagtctttgtctatttatttattattattattattttgagatggagtctctctctgtcacccagcctggagtgcagtggcacgatctcagctcactgcaacctctgcctcccaggttcaagcaattctcctgtctcagcctccagagtagctgggactacagaagcgtgccaccacacccgactaatttttttgtatttttagtagagatggggtttcaccatgttagccaggatggtctcgatctcctgacctcgtgatccctgcctgcctcggcctcccaaagtgttgggattacaggcgtgagccaccgtgcctggcccattgagtcttcaaatttctccactgtttctcctttttctttctttcttcctttttttttttttttttagatggattcttgctatgttgcccaagctgctggtcttgaattcctggactcaagtgattccccactcctcagcctcccaaagtgctgagattacaagcatgagccactacgcccagctatactgattacttttttaattttagtttttattcattttcacagacagggtctcactctgtcacctaggctggagcgcagtggcatgatcatggctcactgcagcctgaactcctgcactcaagtgatcctcctgccttggccccccaaggagctgggactacaggtagaagccgccacacctggcctgtccttattatctttttaggatacatgaaaacaaaaagattcccccaaaggcagacatgtagaaaagaaaatggggactgggcgcgatggctcatgcctctaatcccagcactttgggaagccaaggcaggtggatcatctgaggtcgggagttcgagaccagcctgaccaacatggcgaaacactgactctactaaaaatacaaaataattagccaggcatggtgacgggcgcctgtaatcctagctactcaggaggctgagatgggagaattccttgaacctgggaggcggaggttgcagtgagccaagattgtaccactacactccagcctggacaataaagccagactctgtgagaaaggaaatgagaggagaggggaggggagaggaggggaggggaggggaggaaaggaaaggaaaggaagaaaagaaagagaagaaaagaaagtgggaaactccatcgcaagcctttatcgtacgctcctccccgcagaaccagaacgtgcacatcctgcatcccctattcaacatggaaaacacttgagtagccaaggacaaaaatatgtaatgtttcttactgtgtgtacaccgggacttcctccttctggatcaaacacttcttaatgtgtaactttttggaggaggagtccaacacgctttgcttttgcaatcagaaaaggaaaaaagggcagagtatcatgcttagaggggagagaatgctatcggcaaatttaaaattccaaaatgtaaagtagaaagaggacattgtctgtccatcccacatcccagaattacaggtctggtgtctgcaccgactggctttttttttttttttttttttgagatggagtctcgctctgtcgcccaggctggagtacagtggcttgatcttggctcactgcaacctccgcctcccgggttcaagcgattcttctgcctcagcctcctgagtagctgggactaaaggcctgcaccaccacacccagctaatttttatatttttagtagaaacggggttttgccatattggccaggctggtctcaaacactcctgacctcgtgatccgcctgcctcagcctcccaaagtgctgggattacaggcgtgagccatcacacctggccccgactggctttttctcagtactttccctcggggccttctggccttggttctcctccagaatgtaggatcaatgattaatgatggatgtttctgctgtcaggagctgagatgtggcagcagtccctggagtggagtgaggaactgtttcccacaggccacgccctcggaaaagcaagataaaccaaagtggtgggcgtggtggctcacacctgtagtcccagcactttgggaggctgacgtgggaggatcacttgagtccaggaggtcaaggctgaactgcactccagcctgggtgatgtggcaagtccccacccccaaaaaaagaagaaagcagctagacgtgatggctcatgcctataatcccagcactttgggaggccaaggcaggcagatcccttgaggccaggagttcaagatcagcctggacaacatggcaaaaccctgtctctactaaagatataaaattagctgggcatggaggcacacgcctgtaatcccagctactacttgggaggctgaggtacgagaatcccttgaatccaggaggcggaagtagcagtgatgtgagatcacgccattgtgctccagcctaggcgacagagcaagactctgtgtcaaaaaaaaagaaaaaaacaaaaaaaaacaccggaaagaaaagaggctgcgctcagtggctcacgtctgtaatcccagcactttgggaggccaaggtgggaggattacctgaagtcaggagtttgagaccagtctggccaacatggtgaaaccctatctctattaaaaatataaaaaactagccaggcatggtggcgggtgcctataatcccagctactcaggaggctggggcagggaattgcttgaaccaatggggtgggggttgcagtgagccaagattgcaccactgcactgcagcctgggtgacagagcaagactctgtctcaaaaaaaaaaagaaagaaagaaagaaaagaaggaaagaaggaatggagggagggaggaagggagggagggagggaaggagggaggaaggaaggaaggaaggaaggaaggaaggaaggaaggaaggggagaaggaaggaaagaaggaaggagagaaggaaggaaggttggttaaggactgtctggttccaaagcatgcccccttcatctctacaattcttaacctaaattccagcttgaaggagtttgcagtcagttggcctgagttcaaatcctggctataccacttataaactgggtatccatgtgatttgcttaatctcttggaggctcagtttcttcatctgtaagggccaatcatgcctaagccagaagatcctaaggcctagggcataacctgcagacagcctgacactcagtgagctccagatacactcagggaatttattttagccattataatttctccactcaccactcaccaaattcatttgagcagagccccattaaacaggttcctcaacttttgcacataatgtattcctggaaaaatgtatgaaactgatttcacaaaagtcgaacaacagatttctgtgctacaaaggatgttccatttactgagaactactcaaattataaaatcccaaattacttctcacctgttaggcatcattgtcaaagatagtgtccagggtttcatacatgttatttttaaaaattaattggattggctgggcgtgatggctcatacctgtaatcccggcactttgggaggctgaggtgggcagatcacgaggtcaggagttcgagaccaacctggccaacatggtgaaactctgtctctactaaagatacaaaatattagctgggcgtggcagcacgtgcctgtaatcccagcttcacaaggggctaagccaggagaatcgcttgaacccgggaggtcgaggttgcagtgagcagagagcacgccattgcactccagcctgggcgacagagcaagacactgtcttaaaaaaagaaaaaaagaaaaaagaaaagaaaattaattggatttatcttattgggtatttttttttctcactacaaaatgatagattagatgcttgttgcaagaaaaattcaaaccaggtgcagtggctcatgcctgtaatctcagggctttggggggccgaggagggaggatcacttgagcccaggaggtcaagatcagcccaggcaacatagtgagaccccgtctctacacaaataataaaattagctgacatgatggtgcacacctatcgtcacagctacttgggaggctgaggcaggaggatcgctcgagcccaggaattcaaggctgcagtgagctatgatgatgacacggcactccagtctgggtggcagagcaagactctgtctcaaaaaaaaaaaaaaaaaaaaaaaggccaggcgcagtagctcacgcttgtaatcccagcactttgggaggctgaggcaggcagatcatgaggtcaggagatcaagaccatcctggttaacacggtgaaaccccgtctctactaaaaatacaaaaaattaactgggcgtggtggtgggcgcctgtagttccagctacttgggaggctgaggcaggagaatggcatgaacccgggaggcggatcttgcagtgagccgagatcgcaccactgcactccagcctgggcgacagagcgagactccatctcaaaaacaaaaaaaaggaagaagaataagaggaggaggaggaggaagagaaggaggaggagggaggaggaggaaggaggaggaggaaggagaaggacaaagagaagaagaagacagcaacagaaaatgagagacatgattaatccagcatgcttaatagtttagtagtagatttttccatggtgtccttcccaaaaggtttcaccaacggatgctgtctctaatgatttgggagatttctcatttccctacagcttctccagctctgagcattcccgatcaatttttcatttgactcaactggagtgggaaattgactagattgtgaaaagcatgcacatgctccaatggtctccatctcctccacaatattttttttcttttctttttttttttttttttgagatggagttttgctcttgttgcccaggctggagtacaatggcacgatctcggctcaccgcaacctccgcctcctgggttcaagcaattctcctgcctcagcctcccgagtagctaggattacaggcatgcgccaccatgcctggctaattttgtatttttagtagagacagggtttctccatgttggtcaggctggtctggaactcccgacctcaggtgatccccaccttgggctctcagcctcccaaggtgctgggattacaggcgtgagccaccgtgcccagcaatttttttttttttttgagatggagtctcactctattgcccaggctggagtgtagttgtgcgatctcggctcacggcaacctctgcctcccgggttcaagtgattcccccacctcagcctcccgagtagctgggactacaggcacacaccaccatgcctggctattttttgtatttttagtagacaggattttgccatgttggccaggctggtttcgaactcttggcctcaagtgatctgccctcctgggcctcccaaagtgctgggattacaggtgtgagccactgcacccggccttcctccataattgaacacagtcgcccagcttaagcctccaagggtccagttccaggtcaagatttgctgctttttttgttttgttttgttttgtttcgttttggttttgagacagagtcttgctctgtcacccaggctggagtgcagtggcataatcttggctcactgcaacctctgcctcctgggttcaagtgattttcctgcctcagcctcccaaatagctgggattacaggtacccgccaccacgcccagctaatttttgtatttttagtagagatgaggtttccatgttagccaggctggtctcgaattcctgacctcaggtgatccacctactttggtctcgtaaagtgctggggttacaagagtgagccaccgcgcctggctgatggggtctcactatgttgcccagcatggcctcgaaatcctggcctcaagtgatcctcctgccttggcttcccaagtgccgagattacaggcatgagccactgtgcccagtcaatgagcttttaatgtacataatgtggctgaagtgatgtgggactttcaggctagatcataaaaagatacaacttccacctggctctcagctcttggaaggtgctcgggaggccagctcccatgctgggagtacactcatgccactcaagtatactgggaggaatcgaggcatcccgccaatcatagcacccatctgcatgccctgagagtgagccaccttggaagcagattcgccagcccccgtcaaaccttcagatgactgaagccctgaccaactccttaactgcaaccttctgagaggccctgagccagaacagcccagcagcaaagccatttctcaagtcctaagctacaaagaccacatgaaatcataaggatggaccaggtgcagtgactcacacctgaaatcccagcattttgggaggccaaggcaacaggatcacttaagcccaggggttcaagaccagcctgggcaacatagtgagacccccccgcccccagctctacaaaaaagtataaaaattagccgggagtggtggcacatgcatgtagtcccaactactcgggaggctgaggcaggagaattgcctgaacccgggaggcagaggttgcagcgagccgagatcgtgccactgcactgcaacctgggtgacagagcaagactctgtctcaaaacaaaaacaaaacccaaacaaaacaacaacaaaataacaaacaaattagccggatgtggtggcacatacctgcagtcccagctactcagaaggccaaggccggaggattgcttgagctcaggaggttgaggctgcagcggagctatgattgtgccactgcacgccagcctgggtgacagagtgagaccccgtctcttaaaacaaatttaaaaaaatgctagctctacgagggcagggatctttgttttgtttgctgtcatgtccacagtgcctggaacagcattgggaacagagtacacgctctatgtggttgccacggtgattataacctaacagacctttggtctgcatattctgcgctaaaaaaaaaaatcaaaaaacaaaaaacctaccagatctgatttatgtcagggctagctcagactcttacctgtttcctgcccactcagtgcccatctcggccagtgaatgggacatagctatgacctccctctgcactgggcaaatagattagtaactggcaactatgacaggcgatccactccaaacctcgccacttccctcaggataaaatcccaggtcttctgtgcagtttccagcccccatcctgcctaggattccaccattcagccacaaggaatcatgaactgcttgtagtttgcaaatacagtagtctccagagtggagtacatacaccctataaacaaagctttggggttcaactggaaaaactttagaatatctagatttggggggttttattgtttgttttttagtcttttaaaaataactttttccttttcttttttctttttttaaagacaaggtcttgctatgttgcccaggctggttttgaactcctgacctccagtgattctcccaccttgacctcccaaagtgctagcattacaggtgtgaaccatcatgcccagctccatttatctatcaatattttatataacagttaacagaatatattgatataattgtatttgtatataatttataaataatatccatctttgaggccaggagtttgagaccagcctgggcaacatagtgagaccccgtctctacaaaaaaaatagaaaattaaccaggcatagtggcatatgccagtagtcccagctacttagcaggctgaggcaggaggatcgtttgagcccaggagttagaggctgcagtgagccaccatcaaaccactgcactccagcctgggcaacagagcaagatcttgtctcaaaaaataaataaatgaataaatatccatctgggggtgtaactttaacacttttacctataggggtgtgcaatggagaaaaaaatttggagtcgttgaacacaatgctattttgctcctcagagagtatccggcagtctctggagacgtttttggtagtcacaacagggagagtagggaaccactggcatctagtgggtggaggccagggatggtgttaaatgtcccccaatacacaggacagtcccccacacaaagaactaggccgcccaaagtgtcaagagtgctgggcttgagaagccattgcccaaaaaccccagacttagtcttgctttgggggctctgcacggctgcctcatctccccactctattcctcccctagctaagacctccaatttcagtgactctacaaagcatcccctcctccaatgaagttgccatctctgtgtccccaggctgggccagagccccaccacctaagggctccctgatgtgccctgtactgggttagaattgtccgtcccacggggttcttaaccattgcagattccctggatccctgagacagccggattctaccgggctactagagaccaagaatctgtatttttctcaagcaccgctccccccaaccacacacacactgcctgcccctatcaagggcacacagcaggtggcccagtgactagttgaacgcctactgcaagccaggcgctattacgcgatccactcgggaatcttggcacatactccactccatggtgtagacaccaggattctccccatttcacagaggggtaaactgaggttgagagaggtgaccgtagctaggacagagactcagggcaggaaaagggcccaggtcctcatgagcgccagattcccggggaaggagggagaacagagaggagggtgatgaactgggggagcgcgcgctgggtgggggggcgcggggcctcgccgcggccttctgatgcggccccgcccccacgagggacgtgaagacgcggaccccgcgcagcgtggggacatgtgaccgactgcagaggccgcgccgcctcccccgtccgaggtctgcgcgctccgccgcagggtgcagacccggggcgcccgcctgggtttggggcgcaagagcagaggcggagccagggcggagccagcgcgccgggtcccccctgaatcgaaagcgaaacaggggccggggaggaagggcggagccggccccgaggcaccgccccctgccctgcgcggctgctggaccgacgggcgcacccaggtaggggggcggctgagccgcgcagtgcggaccctcgcggggaactgcgccgccgccaccatgtctcaggaaggtgtggaggtaagcgatggctacggctgggccggggtcagccgcgacagaccccgaggagcggccgggaggcgcggagggggcttcgcagttcctggggacccccatcctagaaccccagatccttacccctgcctggcgctcgccccccttgaaaaggaaagtgactcccacgtttccccagagcgaaatgaggcctccccgaggaaaagcgggggctgcagggtcaaaggtcagaggccagagataacctggccgcccccccacaccttaggctgggacgctcgccccagtccgcgccttcccccaacgccctgtggggactttggctttttccaggaaatgccgtaaagggatgaaaggcggggggggggcggcggaggccaaaaccaagggtcaagttcgggccgggagaacggtgcctagagatgggggagggatgatcccgtttccccttcccccaccggaacccccctgtctccatcccagctggagaagagcgtccggcgcctccgggagaagtttcatgggaaggtatcctccaagaaggcgggggctctgatgaggaaattcggcagcgaccacacgggagtggggcgctccatcgtgtacggtgaggctgcaggggtcccgggcctggtgcggggaccgcgcgtgggagcgccgagggggcgtggtctagggagaggcgttgagatcacctcccccggaggtcccagccttggggaggctctgcgtcgcggctctgggtggcctggaactcccacagacccttcaagggcccttcccttatatgcactctcccccgcaggggtaaagcaaaaagatggccaagaactaagtaacgatctggatgcccaggtaacctatcccctcccctcgcaaaggaccgggtcacgggagggagagcaagaggggggacccgacccgttcatggtgactgacccccctctgaaacaggagggaccaggcattgtcggtccataactcatcacccaatctcactttttcacctctccatcatttgtccggccagggagcctgcaaacagtaggcgctcattatgtgctgattgtattcaatgggggagagagccatgaaactaagcaatgaaaggagccaggattattgccatcatagcgggggcgcagaggtcagagaaggcttactggaggaggaggtaccaagtcttaaaggatggggaggagtgagccctgggaggggaaagggaaagaaaggcaggggtcttggggtgggggagggaatggcataagcaaaggctgggaggtggggaagggttgttagtggcagtctctagaaaggctaggatgagcagaggattggggaggagagagaggcaggggaatggaacccttgtgttgaatgaatgaatgaatgaatgaatgaatgaatgaatgaatggctttgaagcacaggtgcatcatggctactttgcttctttgacagctttggtgatgggaacgctgtggatttagcctgcctgaaaggcttagtgtagggctgttaaagagtataataggccaggcgcggtggctcacgcctgcaatcccaacattttgggaggccgaggcgggcggatcacctgaggtcgggagtttgagaccagcctgaccaacatggagaaacccgtctctactaaaaaatacaaaattagctgggcatggtggcgcatgcctgtaatcccagctactcgggaggctgaggcaggagaatcacttgaacccaggaggcggaggttgcagtgagctgagatcacaccattgcactccagcctgggcaacaagagcgaaactctgtctcaaaaaaaaaaaaaaaaaaaaaatgccgggcgcggtggctcacgcctgtaatcccagcactttgggaggccaaggcgggcggatcatgaggtcaggagatcgagaccatcctggctaacatggtgaaaccccatctatactaaaaatacgaaaaaaaaaattagccagttgtgctggcaggcccctgtagtcccagctactcaggaggctgaggcaggagaatggcgtgaacccgggaggcggagcttgcagtgagccgagatcgcaccactgcactccagcctgggcaacagagcgattctccgtctcaaacaaacaaaaacaaacaaaaccagagtataacaaaacatgtatcatagtctacatttatacatataaaagtatgataaaaatgatagcagaggggccaggtgtggtggctcacgcctgtaattccagcactttgggaggttgaggcgggcagatcacttgaggtcaggagttcgagattagcctggccaacacggtgaaaccccttctctattaaaaatacaaaaaattagctgggcgtggcagtgcatgcttgtaatcccagctacttggcaggctaaggcagaagaatcacttgaacctgggaggcagaggttgcagtcagccaagattgtgccattgcactctagcctgggagacaagagcgaaactccgtctcaaaaatataataataataataataataataataataataataatattagcagagagtagcattcattgagtacttcccacatggcaagattccaggaatttatttatttcatcactgcagtgaccccaggagacaggtcctattatttatccccatttcacagacaaagaaactgaggccgaagtcacttgccagcaagcaggggcagctgcgatttgaaccctggccacctggagtcagagcctgggctctaacatgcctgtcagtgggaacccagggggcagggagtggcttgcccaagtccccacagctggaagtgatacagctgggatttgaacccacatctctctcccacttagccgagcacaacgtggcctcaaaggggcgatatgtcacaacatcaacaagcatgtggcatttgcaggcaggaagtgagtatgggggtcaggctagcctcactcaggcaagccctcccctaagcctcagtttccccatctgagcaataaggtaacaggtgtgcccacctctcagggctgctatgaggacaactgaggccacacacctggctctcaataagtgagtggtgctctgtgagcttctggcgagttaggggcaccctactcattgcggccgggggcctcccccagcaaacgggtggaaagaggcctgagccccatccccagtttctgcccctgctatctccacccaggatccaccagaagatatgaagcaggaccgggacattcaggtgagttggtggctagggcttgggatgggggagttgggagggggacatctgcaggcacagaaggatgtccattagggcaggaggggagatattcactggggcaggaagaggactcgtctgtagggagaggagggctgatgcttatgttggtgcagaaggggtgacacccccccacctcatccccacctgccccattccacaggcagtggcgacctccctcctgccactgacagaagccaacctacgcatgtttcaacgtgcccaggacgaccttatccctgctgtggaccggcagtttgcctgctcctcctgcgaccacgtctggtggcgccgcgtgccccagcggaaggaggtgatgacctaaaacttaacctcgactttgactgtcccgaactccactcctgactcctatcctcagtgactgtacctctgacctaaggatttcaatcactgagagtccaatccctgacctccaaactcagagctcagccttgatctctgatcccaacccctgacccaggactggacttctgaccttaaatgtgagaagcccaatacctccttaccccagaacctgacccttgacccacaattgaacagctactacagaaatcaaacctggccaggcgcagtggctcatggctgcaatctcagtgttttgggaggctaagtagggaggatcgcttgaatttaggagtttgagaccagcctgggtgacagggtgagaccctgtctccaaaaaaaaatgtgttttgaagacagggggtctcgccctgtcacccaggctggagtgcagtggcgggatcatagctcactgcagcctccacctcctggcctcaggtgatcctcccacctcaacctcccaagcagctgggactacaggcctgcgccaccacacttggctaatttttgtattttgtgtgtgtgtgtggagatggggttttgccatgttgcccaagctggtctcaaactcctgggctcaagcaatctaccacctcagcctcccaaagtgctgggattacaggcatgagccactgtgcctggcaaaaaaaaatttttttaattagctgggagtggtggtgtgtgcctgtggtcccaactactcaggaggctgaggtgggaggatcgtttgagcctgggaggtcgaggctgcagtaagccatgatcacaacactgcattccagcctgggtgacagagcaagactctgtctctaaaaaaaaaaagaaagaaagaaaagaaaccaaatctgacctcaaaaacacagccccaaatctggcttctgaacctcctgactagtagttcacttctggtcaatgcttaactagttcttgcaaaagaggcaggaagccaagatgtgtagtgtttgccaatttctgtggtgtaaatattcccaccatggtcaatatcaggctacccacgtgaagtcactgattgagttgggttgctcaagctgaggccagccgctgcagcacactgctagccctgaccccaacctcagacacctctgacaatccttggtcccctctctgtaccttcctgcccaccaccaccaggtatcccggtgccggaaatgccggaagcgctacgagccagtgccagctgacaagatgtggggcctggctgagttccactgcccgaagtgtcggcacaacttccggtgagggcgctgacccccagctccccctcagccctgccctaccccagccctgcccctccctgccctggccccaccctggcccagcctcgccctcggaccctcacagccctgcccgcccccaggggctgggcacagatggggtccccgtccccctgctacgggtgcggcttccccgtgtatccaacacggatcctccccccgcgctgggaccgggacccggatcgccgcagcacccacactcactcctgctcagctgccgactgctacaaccggcgaggtgaggctcttctcccccaacagcctggacagtctttgtccccttctgtgcctttaagtccccaaatctccactcagtccactttgtctcccacagcagcagccactgcttccacatggcctccatgaccccccagtctccgtggtcttgcccaggaggctctgaggtttcaccccagtggcccgtgcctgagggtccccatggcctctgcccccatggtctctgggtttggggcccctgttttgtcccctgtaatctcaggtgacccccatgtccccaggtctcctgtatcttcaacacccctgaatgtccagttgtgctggtccccgtatctggtggtctcagctcctccctagagccccgcgtggcctaagtcccctcctccccagactctcatgggacctccagccccatgtctgcagcacctctccctccctagagccccacgtgcctgggacatcctgtgctcaccccaagagccggaagcagaaccacctgcccaaagtgctccaccccagcaaccctcacattagcagtggctccactgtggccacctgcttgagccagggtggcctcctggaagacctggacaacctcatcctggaggacctgaaggaggaggaggaggaagaggaggaggtggaggacgaggagggcgggcccagggagtgacccctgccaggtgcagatacaaaccagacacggtctgtggctactttgtgttattataagatatgagctcaaaccgagatatgaatgaccttggggagccatctgaggccaagatattgacgggggggattcctgggtcccattttcagcgcccagggtcacagatccacagtgggaagttctgtgggacacattggcactgagccacaaagaaggtgtggccagaacaacttgggctcctgctgaccaatgtcctctagggcctaggggacagaggaacacagagtcacagcttcaggggccgaatgagcatggcggccttcctgagagaatatgccccaccacgaaactcagcccagtagacaccatcctggtagcggcttcggtagtggccgccgtggtgccacacaccgttgaggttggagtgggcacaggcatggtaccaccagcctccccgctggtacagggcacagttacctgaggggagagagagagtccatgtcctctcaccagaataaaagcctctacctgcacctcacagtgcaaggcttttgccaggcatcccctggcccctcccattcttattgaatacaagccctgatcttccatctcctcagcaaaaaaataggagccctggccccccaactttcttcagagtaatagccttaattccttccctatctccttaccaaagtacaagtcacatctttcccaccttttctgcaaactaggagtctaccgttcattcctttatcaaagaaaagtatctacttcctttctagaataagagtactagctctcaccctctgccctttacttgaacaggagtcttgattctttttttgcctcatcagagaaggaatctggactccccatccccccaccaggataaaagtcctgacctttgttctcttgacggaataaaagcttgcttatccttatacttaccagaggggcgtcttacctaccctacctcctttcattccctcaccagaacaggagtcccgcctcccctatcctctcaccagaataggagttctccttaccagaataggagtctcggtccctatccacggtgctgaagggcttgtcattgtgccaggaaagagagtctccagcatcaccatggtactggccaagccgcaggcggtagtggtcgctctcgggttccagggagaagccatcatagtgggcacgtgctccacggcccccccagtcctccaggagaaccagcagctcatggtccccacggctggtcagctgatacacgggttcaaggcccagccagtattctccgtctggccgcccaaagcccgcctggcagggcaggaaagtcaggaagccagaacaggctccctccccttccctgcctctgcccacctgtgcccaccttatagtgctgccaggtagtgaagaagttgactgaaccatcttgcctccgctggatcacagtccagcctccaccctccagttgctgctcacaccatactgacactacgtgacggcccactcgcagttcatacactccactctgttcatggcctgcctggcgggcctctgcacaatcctgccacgggcctgtgggcacagggataggggggaggcacagcctgggctgaccaatcccttactggagcaagagtcaagattctcacaggtcctctcaccagaataagagttctgcctctcccacttttctaccaaagagtcctgcctctcccatttcctcaccagaataagaggcctgcctctcccatttcctcaccagaatccgagctccaatagccatttctttacctaagaatctgggtcccttgtctctaatcaaaggaaatgtcaagtctggggttctttttttttttgagatggagtctcgctctgtcactcaggctggagtgcagtggtgcgatctcggctcactgcaacctcatcctcccaggttcacgcctttctcctgcctcagcctcccgagcagctgggactacaggcgcccgccaccacgcccagctaattttttgtatttttagtagaaatggggtttcaccgtgttagccaggatggtcttgatctcctgacctcgtgatccacccgcctcggcctcccaaagtgctgggattacaggcatgagccatcgcgcccggccaactctggggttcttaaaccctggttttttatggtctcctcaccataatataagtcctgaatatgatactctgaaccagttcaaactcttaccaaagtagcagtcccaaacatcgcctcactaaagtaagagtccctcctcttctatttcttgtttctcctattttcacaccttagaagtttggtcttatttttaatcagaataggagtatcatttcttctggtcttctcacaatgagagaaatctgccactaaaatcctgactcctcaattttcctctacccacaattcctcagccctaatgtcgacttacccacaggcttggtggggaccgcagggtgacctgcaggcatgggagaagccatgggctcctgctgtctctgggtctggtctctctggggctctggggctgggtccagcatcctactggtgtcactggtgctacccacaagacggaccggaaccacaggcaccagtgggggtggcggcaggacctggggtgacggagaaagtcaggtgtaattgcactaaccctcaggccaggaggcctggtctcaggggcagaaatggtggataaatctcccagctcccaaatgacctggacatctggcagtgggggtgtcccagccctaggaatgatcctccccaaaagctaaacaacttggctttaaagtgcagacaggctgggcgctatggcccgtgcctgtaatcccagcactttgggaggccgaggcgggcggatcacctgaggtcaggagttcgagaccagcctgaccaacatggtgaaacctccgtctctactaaaaatacaaaaaaaattaactgagtgtgttggctcacgcctgtaatgccagctactcggaaggttgaggtaggaggatcgcttgaacctgggaggtggaggttgcagtgagccaagattgcaccactgcactccagcctgggagacagagcgagactccatctcaaaaataaaattaaaaaaataaagtgcagacagagctgggcttaaataccggctcttggtgctcatggtttaattgatctgtgccccagcctcctctgtagagtagggataataacaacacatccaacagtatctaacttactgactcctctcaccaaccctgtaacgtagggactgtcacagagcaacattctcttatcccaaacccagaccaggacacgttccagaattcagaataacacggctggatttagacacagtgacacagggagggttatgtatatgcatgtgtgtatagaatatacataacactcctaaaggggtttttggtctttacgtgataatgatatgtttaattataggatcctatgactattcacattaagtggttaagtgaaggctataaatagccaccagtcactttttgacccaaataagttaccagaaggggcgagtaggaatccggttttcagggttttgcggatttcagaactgtggataagagatcgtggggttgcaaaacccccatttcacagacgatgctgctctccggggaggctgcgaggttacctgctgctgcccgcccgcgcctcccgggcacaggcgctccaggcgggcgatgagactgctctgctgggtgacgagctgcgccagctcgcggaacttgacgtccagctggtggaaccgggcggctgcgcgctgagcctcggcggacgcgttgagcacgcgctccccgagcagcgccagcgccgcggcaggctccgcccccagatccgcccccgggcccgccccgggccccgcctcgtgctgcagctgcgcgcgcaactggcccaggcgcgcgctcaggccgcggctctccttgcgcagcgcgcgcacctcgccggccacggcgccgtcggccgccgccagcctctgcagctcgcgtaacagctcctcgtggcggccgacgcgcatgcgcagcgccgccagctcgctggcgttggcggcctcgggcgtcgcccgcgtggatgcggggccgctccagcacacagcgcccgtgaacttctgcgggggcagcacgaaggtgtaggtgcagcgcggggcgcccgcccgcgcccacgacgcgcccagcaggagcagcagctgtagcgcacgcagccagggcttccccatcgcggcggacctgcaggcagaggaggaacggaaggaagacggggtgctggggcccagcgagacccctccgcttccacgcggggatgcgcgcgtctacacccgcgatgtcccgggcccataatttcagtccccatctcattccccccacggctggagggccccagggtgatcccactctggcttcaacaccgagctcttggcgccaggccggataacgcatctcaagcattcattcattcgacaagcgaggccgggcgccgtagctcacgcctgcaagctcagcactttgggaggccgaggcgagaggatcgcttgagaccaggagttcgagaccagcctgggcaacatggggagacccctgtctctacaaaaaaaaaaaaaaaaaattagacagacgtggtggtgcacacctctggtcccagctattcgggaggctgaggcaggaggatcacttgagcccaggagttcaaggcttcagtgagccatgatcgctcccctgcactccagcccgggcaacaaagtgatagcccatctcaaaaataaataaataaataaaaacaaggcttatggggccgttcaggccggtaattccagcactttgggaggccgaggtgggctgatcacttgagcctaggagttggagaccagcctagacaacacagagagaccctgtctatacaaaaaatacaaaaattagctgggcatggtggcaagggcttgtcatcccaagatcgcctgagcccagcagttccaggctgcagtgagctgcgatcacgccactgcactcaagcctgggcgacagagcaagactctgtctcaaaagaaaaaaaaaaaaaagcagtcactaggcacaaatgtgtgccagccccctttctaggcactgggaatacatttaggaacaaaacagacaaaaatccctcccctagtgggcaaaaaaataaatatgtactgtataggatgaataaatagagcatattagacaatgttaaatgctaaaaataacagtagggccaggcgcggtggctcactcctgtaatcccagcactttgggaggctgaggcaggtggatcacgaggtcaagagatcgagaccatcctggctaacacggtgaaaccccatctctactaaaaatacaaaaagttagctgggcgtggtggcgggcacttgtagtcccagctacttgggaggctgaggcaggagaatggcgtgaacctgggaggcagagcttgcggtgagccgagattgtgccactgcagcccagcctgggtgactgagcgagactccatctcaaaaaaataaaataaaataaaataataaatataaaaataacagtaggactggtgaggcggctcaggcctgtgttaaggcgggaagactgcttgaggccaggaattcaagaccagactccagactgggcaacgtatccagaccctgtctctaccaaaaaaaaaaaaaaaaaaaggaactgcaagtgcacagaaccacatctggctaatgtttaaattttctgtatagtcagggtcttgctatgttgcctaggctggtctcccctggcctcaagtgatccacctctgcctcccaaaatgctgagattacaggtgtgacccaccatgccctgctaatttttaaactattttgtaaatctgggctcagtggctcacacctgtaatcccagctctttgggaggcagaggcgggaggatcgattgaggccaggagtttgaagctgcagtgagctatgatcgcagcattgcactccagcctggggacgagagcaaaccctgtctcttaaaacaaaacaataacaaaaaacagcaaactaggtaaagaatacgcaggtctgtgcaggggcagcttgagagggggttgcctaaagggaaggcctggtggaggagcagatctaagtgcaaaagctctgagactggaccctgcctgatgtattaaagcaacctgggagaggttaaagcaaaagcgaagggaggctgggtgctgtggctcatgtctgtaatcccagcagtttgggaggccaaggtgggtggatcacctgaggtcaggaattcgagactagcatgaccaacatagtgaaaccccatctctactgaaagtgcaaaattagccgggtgtggtggtacaggcctgaaatctcagctacttgggaggctgaggcaggagaatcacttgaacctgggaggtggaggttgcagtgagccgagatcgcaccaccgcactccagcctggacaacaaaagcaaaacactgtctcaaaaaaaaaaaatagcaaagggagcagggtgcaaggaggtgaggtggggtgagggaaacgtctcactaactgccttcccatccgtcggatattggaaaccccatcttccacgtcctcagaccaaaaccccagcagatccaacccatctcagcagatctaatccatcagccagacccgtctgctcttctgcttagatcctgaattcctccacgtctccgctactccccactgcccccagaccctccctgaattcccagctcaagacaccatctggatgacagcagctgcctccctgctctctggatttccatcctcaaccccaggtctagtctctctgacagcagccagagggcgcctgtgaacatctgagtcagttcacgtccctccctccctcctctgccctgaatccttcttggctcccacctcctttagaggaaaagcccaaatccacccatgatccataaaaagttgcgctatcttggtgactcacgcctgtaatcccagcactttgggaggcggaggcgggcggatcacgaggtcaggagatcgagaccatcctggctaacacagtgaaaccccgtctctactgaaaatacaaaaaaagtagccaggcgtggtggcggctgcctgtagtcccagctactcgggaggctgaggcaggagaatggcttgaacccgggaggcagagcttgcagtgagccgagactgtgccactgcactctagcctgggcaacagagcaagactccatctcaaaaaaaaaaaaaaaaaaaaaaaaacttgtgctatctgccatatccccttctgccctcctcccaggcccttcctcacacgaagcaagttccagcctcaggtcctttgtacctgctgtttttgcagcctggaacattgttcacaacttaacatcattcccttcctatccttattcaagtctcagcagcgctccttgaacagcagatttagggttgtacctccatatacaagctctctctctctctgtctctccctctctctctctctctttctctctttctctctctctctctctctctctcccccacgccctcttttttttttttttagacggagtctcgctctgcaatctcagctcactgcaacctccacctcccgggttcaagtgattcttgtgcctcagcctcccaagaagctgggattacaggcatgcgccaccacacccagctaatttttgtatttttagtagagacagggtgcctgatcaacaggtgaaatcccgtctctactaaaagtacaaaaaattagctgggcgtggtggcgcatgcctgtaatcccagctactcgggaggctgaggcagaagaacggcttgaacctggcagaggttgcagtgagctgagaccgcaccactgccttctagcctaggcaacctgggtgagactccatctcaaaaaaaaagaaaaaaaagagagagtcgtgctctgttgcccaggctggagtgcagtggagcaatcatagctcactgtagcctccaattcctgcacacaagtggtcctcctgcctcagcctcctgagtggttggaactacaggtgcgcaccaccatgcccagctacttttttgtagggagggggtctcactgtgttgcccaggctagtctcaaactcccaggctcaagtgatcctcccaccttggactcccaaagtgctgaaattacagatgtgagcaaccacactggccctaaacctatgcttcctgatgcctgcacaagcacatatcccgagggtctccatctcacacacacattgcctcattcatgcattcaaccacagacaccttgagtgcctattgtgtgccagggatgctgttttaggcaatgaggacacagccttaacccaaacagacaaaattcctgcccttgcagagctgacattcaagttgggagaacagagaaataagtcaaacagccgctaggtaggtcagagggtaatcgtgcttaggagaaaaatggaacaggcaagggggtgacagtcccggaggtgggggacatttaatagaggagtcaggactgggtgtgctgactcacgcctgtaatcccagcactttgggaggccgaggtgcctgtaatcccagcactttgggaggccgaggtgcctgtaatcccagcactttgggaggctgaggtgggaggatcacttgaggccaggagtttgagaccagcttggctaacgtggcgaaaccctgtctctactgaaaatacaaaaattagccaggcgtagtggcacgcgcctgtagtctcagctactcaggaggctgagacacaagaatcacttgaacccggaaggcagaggttgcagtgagccatgattgcaccactgcactccagcctgggcaatagagcgagactctgtctcaaaaaaaaataaaatagaggagtcaggaaaggcctcacagaagaagtgacacttgactggaacagtgcctcatgcctgtaatttcagcactttgggaggccaaggcaggaggattgcttgagcctaggagtttgagaccagcctggccaatatggtgaaagtccatttctactaaatataaaaataaaaataaaataaagaataagggacactttcacaaagacctgatggaagagagagaagaggaagagcattccaggcagagagaacagcaggtgcaaaggcccggagattgcacccaagaaatggcagaaaggggccaggcacggtggctcacgcctgtaatcccagcactttgggaggccgaggcgggaggatcacctgaggtcgagagttcaagaccagcctggccaacatggtgaaaccccgtctctactaaaaatacaaaaattagctgggcatggtaatgcatgcctgtaatcccagctactactcaggaggctgaggtgggagagtcacttgaactcaggaggccgatgttgcagtgagcagagattgcgccattgcactccaacctgggcgacagagcaaggctcaaaaaaaaaaaaaaaaaaaaggccaggtgcggtggctcacgcctgtaatcccagcacttgggaggccaaggcaggtggatcacggggtcaggagatcgagaccatcctggctaacacagtgaaattccgtctctactaaaaatacaaaaaaaaaaaaaaaaattagccgggcatggtggcgagcgcctgtagccccagccactccagagactgaggcaggagaatggcgtgaacccggaaggcggagcttgcagtgagctgagatcgcgccactgcactccagcctgggtgacagagcgagactctgtctcaaaaaaaaaaaaaaaaaaaaaaagaaatggcagaaatgtctatgaggccggaagagagaagggggaagcaggaggaggtaagaagtgtcagggcaaagtgtgaagggtcctgtgggcccggaggaggacttgggttttactctgagtcaggcaggagccatggagggttctgggctggagatggccacatttacttctggactcagacaccaagcaggggctcacaaggatccgggggtagggtcctctctttgtccccgatcactgacatgccccaccccccacaacagagattgagcaaccccccagaactgggacgtgtgtataacacccgctgccttttacactctcagcctggggtggcggggtggcctgggggcccccaagccaagctgtggtcggagtttccccacagtgagaatcaacctccacctaccttcccaccctctcacctctgatgcccaagaccctgaatccagcgaagctcacagaacacacaagaagtccaaggaagagccgagggtccagtggggcctctgagctagagacggggagagggcagtgggacagaaggagagaggaggcttggtaaccactccccagcccccagagcctgggagtggagctgggatgctgggcccaggagcccaaactataaatatttagcatttcccgaatgagaaatgagacagaattgccagacccccctgcccaggccaccagagcctgataacacaggtcagtgtcctggacatccctccctttcccccacaccctccactgcagagcccagagcgtgggaggctgcaggccctggggcagccaggcgtgatcccagccccagacacgcacacaccacacatagaaagaggaacatcactggggacttaccgtgtgtagggcttggctctaaactctccacaccttttacgtatttgatccttacaacctgagctggattctgtatgtaccctcattttacagcagggaaaactgaggctcagagagggtaagcaacttgcctgcggtcacacagccaaaaagagaccaggatgggagccagccaaggtagcttgactcagaaactcacacatgtacaccacagctgtcacacacatatgggcacataacagagtggacacaaacacacacacacacatttgcacgcacgcacacattaacacccagcgaaagtctgggtgcagtggctcatgcctgaaagccagcactttgggaggccggggcaggtggattacctgaggtcaggagttcgaaaccatccttgccaacatgctaaaaccccgtctctactaacaatacaaaaattagctgggcatggtggcatgcgccagtaatcccagctacgcgggaggctgaggcaggagaattgcttgaagccaggaggtggaggttgcagtaagccgagatcgagcaaccgcatgcactccagcctgggcgacaagactgaaattccatctcaaaaataaataaataaataaataaataaataataaataaataataataaagtgaggaattaattaattaaaataaaaaataaatataaaagacacagctgtaaatttttaaattgtgatagaaacaatatattcttaaagtgaaaaccctacctcagttacatgtgatttatgttttttggattaatctggattttataattagaaataaaaatgtaaggctgggcgcggtggctcacgcctgtaatcccagcactttgggaggccaaggtgggcagatcacgaggtcagcaattcgagaccagcctggccaagatggtgaaaccccgtctctactaaaaatacaaaaatttgccgggtgtggtggcccatgcctgtaatcccagctactcaggaggctgaggcaggagaatcgcttgaacccggggggcggaggttgcagtgagccactgcactccagcctgggcgacagagtaagactctgtctcaaaaaaaaaaaaaaaaaaaagaaaagaaataaaaatgtaagattttgagtccacataattatttgttgaaaataatacaagtcagtataatagagaagcattcatatattcaacactgtgagacaaaacaccagagaccttggatttgataattgatctgatatcctggacagtattcatatgtacagtgatagctatctttctttggtgttttttttgttttgtttgtgtgtgtggtgtgtgtgtgtgtgtgtgtgtgtgtgtgtagttttatggttctgagttggtggccagtaagttccatgtagtgttggcacttatttaattaactattcatgattttgttaatagcttgttatagaattcaggcatatatttttcagcataagaagccaagcacaccagcttgtcattggagagaatatattaagtgagaaaaacattcaggaatcagagctttaacatgttaaagttagtgctaaacattgtcatattggatctgaacctatcctaatatataaccataaagcttgacttctgcattggaactatgctttcataaataaaggatatctcattgattaaaaaaaatttttaaaaagacacagctggaaacataacagtttcaggcaacaactgtatgttccaaatatggtcacacacacatcacaacttaaagggaaatggggtgggctgagtgggtctttatctgtgtgtcaggcttgtccacatcctggttcttgtgatcacacagtagtgcacagatacaaaacaggtacacacagttgacacccggaaacctatccaccgcaccacagaggtcaccgtctgtctcccacacactcggtcacattttcacacaagtcaaatcacacgaggacggaactgggggaagtaaccatgcagtcatttcccaggggtacaaagaaactcacatagagccccacagagcccaggcccagggtctgagacctgtccaaaggccccaccgacgaccagccacacgccgggagagtcacctccttcccctggtctgcaccatcctgagctcccgagtaactcgagtggactccagggttgaaaaaggaaatggtcgtcccagatctgagagaggctgccaggctgggctctgggcctgggttggggcccccacactgggcccctcggccccccaccctcagccccctctggcttccccattggcagtagagagggagggaacttcataagtcacagagaggggctgaagaatacagagagtcagacagatggagatgggagaggcatagggagatgggagagacatagggagatggcagagaaagggagagacggggagatggggagagacagagagagatgggaagatggggagagaccacagggaggcagatgagaagaaagaaacagggatggggccagacacagagaaaggaaacttctttagtttccatcttcagttataaatgatgaaagagacaactgatgacagagacaaagttacaagagggagaaagagacagggggaagacgagggggaggggagacacatctgggggagaggaggaagaattggggtgccagagagagcaaggagggagaggaggccgatgggggaggagagagtaatgttcagcccagtgagggggtgtccctttcccccactgcaaggttttggggaagaagccagaggcctgaggccaagactgaggctttgagcggaaagaaggagggggcgagttattcacgaaacgcccgccttgccctgagtttccagaaggtgatgtggagtttccatccctcagcctgtctgcagacaggggtacccggggaggacagctggcccagaggagttgcgagactaaagtgaatgattgccacagtcattccctccggtggcttctccccaagtacttggcgccagagcgcccaacattgtgcatacatggtcgctcctaattcgtgggcccgggggacattatcagccttactttgggatattttaggagcctcggaatgcagaaagtggttttagcccagctggaggaaatgggccgaagcgggattcgaaccggcggattcgtttctctgcagcccggagccgcgtagccccgccccggtctccctagaaacaggcacccgtgtctccatagcaaccgctccatctgattgcccctccccgctcccagaggccacctagtgcgcaggcccgcctgatgtcgtcccacgccgtgccggctctcaggcgccggaagtgagctgcgcagcgccggaagcggcggacgcaggaggcctcgtggaggacacagcagcatgggacagtcagggagggtaaggcccggcagcttgggaggcaggtggcgcaggtggggtcccggccgaggtcgcggcgctgaccctttgtctctcgtcgccgcagtcccggcaccagaagcgcgcccgcgcccaggcgcagctccgcaacctcgaggcctatgccgcgaacccgcactcgttcgtgttcacgcgaggctgcacgggtcgcaacatccggcagctcagcctggacgtgcggcgggtcatggagccgctcactgccagccgtctgcaggtttgtaccccacccccagcccgcctccacccaccctcggcctagtcttcgtagctgcagtaatggctcccgctgtaaaactgtgggaggacttaagtctccccagctggaaaaaaagaccctcatggggagcatcatttctgcctttcagggcttttgctgggctggagtgagggcgcgcagcttgggagatagatagtcgcctaagcctgacagttaagactggaatctggagccgggcgtggtggctcatgcctgtattcccagcatttggggatgctgatgcgggaggatcacttgagcccaggaattcgagaccagcctgagcagcatggtgaaaccccgtctttacaaaaaatagaaaaattagtcggatatggtgttgcgtgcctgtagtcccggctactcgggaggctgaggtgggaggattccttgagcccaggaaattaaggctgtagtgaatcgggatcgtgccacttcactccagtctgggcgaccggaggagaccgtgttagaaaaaaaaagactagaatctggaggcagcaaagcagggttggaaactgacttctccccagtatctgatgcaagttacttaacctctctgggcctgagttcgctcatttgtcaatgggaagatgcgctgtgagcaagagacagagttagaactcaaatctgcgtccgactgactctaaaggctaagatccttttgctcctctgggcttgttgaaagggtcagatgcaagacagaccataacaggatctgcaccgtcagcttatagttgtcacaacaagggataagctatgttttctttttttctttttgtcatttccaggttcgtaagaagaactcgctgaaggactgcgtggcagtggctgggcccctcggggtcacacactttctgatcctgagcaaaacagagaccaatgtctactttgtgagtagacgccctcacccttcatctcccccagacccccccttcccctatctctcatgatgaacacatatgcctctgagctgctgtgatttctggcttcaaagtaaacgctctgaagaagagatggggcaaaggtgcctactccgggcacctctgctagacccctccagagtcactgatcttttcttctcctgcagaagctgatgcgcctcccaggaggccccaccttgaccttccaggtcaagaaggtgagaggggtggaggtggtacaaagccatgtggggtgggagctggacttggggttgtccgcagccatgtgtggttggtggtcaccccctcctctctcctgtcctacagtactcgctggtgcgtgatgtggtctcctcactgcgccggcaccgcatgcacgagcagcagtttgcccacccacccctcctggtactcaacagctttggcccccatggtatgcatgtgaagctcatggccaccatgttccagaacctgttcccctccatcaacgtgcacaaggtgggtctggcctggcgaggtggcaggtatgggggggtgcagcggatagaggtgccacaggccctcagatggattgctcactcctcccagcgctgagactgggagctcctgggtctgctgagtcctgaggtcaaatcccactcctgtgtctgatgatgctgggcaaaagtgtccagagattcccccagcggtccacaccccgtgagctgcaccttttccagccggtggaaagaaatactgatggagctctgtttcccacgtgtgttgagtgctgggctgagcaggatcgtagcatctcttcttagggccctgttttacagagggaagctgcgggcccagtgctatggcttcggcctgtaatcccagtactttgggagggcgaggtgggaggatcgcttgaagccaagactttgagatcagcctgtgcaacatagcgagaccccatgtctacaaaaagtagatttttaaaaagcccggtgtggcggtgcatgcctgtagtaccagctactggggaggctgaggtgggaggatcacctgagcccaggaggtcaaggctgcagtgagttgtgttcacgccactctactccatcctgggtgacaaagcgagacactgtctcaaaaaaaaaaaaaaaagcaaatctgaggctggcagagatgctaagtttagattccagggggcaggactggatttttaatttcatctggctcctgagtcctagctcctaatccttgtcactagtgactctcagatgggacttataaattatatataagatatcagtcatcagggaggctaatacggctctgggaccagaatttcttgtttaccttttttttttttttttgagacggagtcttgctctgtctcccaggctggagtgcggtggcacaatctcatctcattgcaagctccgcctcccaggttcacgccattctcctgcctcagcctcccgagtagctgggactacaggtgcccgccaccacaccccggctaattttttgtatttttagtagagacaggatttcaccgtgttagccagggtggtcttgatctgacctcgtgagctgcccgcctcggcctcccaaagtgctgggattacaggcgtgagccaccgtgcccggccttctttactttttttttaagagacggggtctccgtacgttggtcttgaactcctgggcacaagcaatcctgcagcctccgcttcccgagtagctgagactacaggcgtgcaccaccacatccaactcatttttccatctactttttgtagacatggagactcgccgtgttgcccaggctggttttgaactcctgggctcaggcagtcccaccacttcagcctctggagtagctaaaactgcaggtgcgagctggaagcagcatttctagccagtgccacagtccacgaacagtgtgtgtatcccccaaagcccccacttccccaaactttgccatgagtctactggactatgctctcttcctccccttccaggtgaacctgaacaccatcaagcgctgcctcctcatcgactacaaccccgactcccaggagctggacttccgccactagtgagtgtcccagcaggatgggagacgagggggtgccgggtgggggcctccacatgcggctgatgacagcacttctgctgagacgctgtgattgctctgtccaaagtaaacgccctgacgcactgtgggaagggtgagatgggcaccgccagccccatcacgtgccccctgaccacccccttgccgtccactcatgttcctgcagtagcatcaaagttgttcctgtgggcgcgagtcgcgggatgaagaagctgctccaggagaagttccccaacatgagccgcctgcaggacatcagcgagctgctggccacgtgaggagggcatagggcgggaggccactgcggcccggggaccccagaacaggaccgggagcctgagctcccccactgagccctgttatgtcctacacacaggggcgcggggctgtcggagagcgaggcagagcctgacggcgaccacaacatcacagagctgcctcaggctgtcgctggccgtggcaacatgcgggcccagcagagtgcagtgcggctcaccgaggtgaggcccagggcagggggacccccgggctccaccagtcccaacggtgggctgacgcttcttcctcgtcccctcagatcggcccgcggatgacactgcagctcatcaaggtccaggagggcgtcggggagggcaaagtgatgttccacagttttggtgaggccggggccgccgggggtggggggtcatgggtgtggagctgcacccggatcttggtgacccgcgtctcttggctcagtgagcaagacggaggaggagctgcaggccatcctggaagccaaggagaagaagctgcggctgaaggcgcagaggcaggcccagcaggcccagaatgtgcagcgcaagcaggagcagcgggaggcccacaggtccaggcagagctgggaagggcagggccaagggggggtccctgggatgggcggctatgttgacccccacgccctcctccagaaagaagagcctggagggcatgaagaaggcacgggtcgggggtagtgatgaagaggcctctgggatcccttcaaggacggcgagcctggagttgggtgaggacgatgatgaacaggaagatgatgacatcgagtatttctgccaggcggtgggcgaggcgcccagtgagggtatggagtggggtctgcagcagggcacccagagcctgtccttgtctctgggggccctgacactgtctctccccacagacctgttccccgaggccaagcagaaacggcttgccaagtctccagggcggaagcggaagcggtgggaaatggatcgaggcaggggtcgcctttgtgaccagaagtttcccaagaccaaggacaagtcccagggagcccaggccaggcgggggcccagaggggcttcccgggatggtgggcgaggccggggccggggccgcccagggaagagagtggcctgagcccaagccgcaccggagcagcggctggattgaacgccccagattggggcccgagatgtggccctcggtttcctttcataaaggagttgtgtccccagcccttccactccagtaaagaactgaattggccaggggtccacgtcagcgtttgggatgggggattctggagccatacaaagcaacccagagagtcctgggccggccacacccgagagtccctcccacctggtttcttcctggaagctgggtctctcccctaccctgcacggggttggtttcattggtggcagcagcagccatgagtggcccctccccccagtcccaccaaagagccgtgcaagcagacaggtcacactttcagcagatgagcttgaacctcaggagggttgtggcacaatgaggaaggaaacgtgggtggaaaggcacgctggcctgctctgctggctgggccagtaactggggatggggctggggcagggcccactaagccactggtgactgggggaggggctggggaactgggtagcagacacaggctgaggatcggcacgggagcatggcagccaacgtctcgggtaaggagaaggcatgttggctgtctctgggggtctgcagattgtcaggaggtgggggtagtgggtattggtaaaacacctaggtctggggctgggcacggtggctcacgcctgtaatcccagcactttgggaggtcgaggggggtggaacacgaggtcaggggttcgagaccaccctgaccaacaaggagaaaccccgtctctactaaaaataaaaaaattagctgggcctggtggcacatgcctgtaatcccagctactcgggaggctgagacaagagaatcacttaaacccgggaggcggaggttgccatgagccgagattgcaccattgcactccagcttgggcaatgagcgaaactccatctcaaaaaaaaaaagcctaggtcaaggctgggtgtggtgatgcgagcctgtgattccagctactcgggaggctgaggcagggggatcacttgaccccaggaggtcgagactgcactgagctgtgattgcaccactgcacctcagcctcggtgacagtgaaatcctgtctccaaaaaaaagccacgtctagacgacacttcctccttaagcaggctggcgttgggagcagggaggcgcctccggagaagcctgtccccagcctgcagaggcaggggtggggtgcacaaggagtgagtgcccctgtgctgctgtgccctgggcactgtggtgagcactggcaccagtaatgggtaagcaggcccccccatcctcccgaaggagggagatttttctcaccgtcatcaggtggcgcagggtatgggggaaaataacgcagggaagggagagtggaggcacgagggctgctgtcaacagtggttagggtggccttggggcctctcgcaggcaggaccacggacgtgggaagaggagcctcaagaatgtctgggtgtggctgggcacggtggctcacacttgtaatctcagcactttgggaggctgaggcgggcagatctgaggtcaggaattcgagacctcttggccaacatggggaaaccccatctctactaaaaatgcaaaatttaaaattaaaccaggcgtggtggtgggtgcctgtagtcccaaatactcaggaagctgaggcaggagaatcacttgaacccgggaggcagaggttgcagtgagctgaagtcacatcattgcactccagcctgggtgatgagagtgagactctgtctcaaaaaaaaaagtctgggtgcgaaggtaccaaggcacaagtctgcaagagcagccaggaagcctgggtgggctggtgcgagggagtgagtcgcggagcacagagggtggcactggggggtatggcgggcgggagcgctcttgggggaccttgtggggtgagtctggctttttggcggcaactccctggccaagtgtgagcacctggaagcaaaaggatggggcaggactccagcgctcgcgggtgctctctggtggccacggggagaagaggctttgggcggcggcgggtgccaaggtcagggcagagtgggggctggacccccacggggctttggacggcacagatctgaagtggagccggcaggccttgctggggctggactttggggaggaggcctctagtggggccaggtgtggtgggggagtagggtggccgctgtctgtgttaccagtggaccttgagctccaagactgcctggcccgcctaagctggtccattggggcccaatgcataaccctggctctgagcctcaatcctgtccacataaaggagtggagcccggtccccctccagggaggggaaagaactcgtgtccagggatccacgccatggcagacgtgggctcttggggtagcaggagccgccttatgggggaatagggctcagctggtgacaccttctgcccacaggtgccaagtcctgccctgccaacttcttggcagctgccgacgacaaactcagtgggttccagggggacttcctgtggcccatactggtggttgagttcctggtggccgtggccagcaatggcctggccctgtaccgcttcagcatccggaagcagcgcccatggcaccccgccgtggtcttctctgtccagctggcagtcagcgacctgctctgcgccctgacgctgcccccgctggccgcctacctctatccccccaagcactggcgctatggggaggccgcgtgccgcctggagcgcttcctcttcacctgcaacctgctgggcagcgtcatcttcatcacctgcatcagcctcaaccgctacctgggcatcgtgcaccccttcttcgcccgaagccacctgcgacccaagcacgcctgggccgtgagcgctgccggctgggtcctggccgccctgctggccatgcccacactcagcttctcccacctgaagaggccgcagcagggggcgggcaactgcagcgtggccaggcccgaggcctgcatcaagtgtctggggacagcagaccacgggctggcggcctacagagcgtatagcctggtgctggcggggttgggctgcggcctgccgctgctgctcacgctggcagcctacggcgccctcgggcgggccgtgctacgcagcccaggcatgactgtggccgagaagctgcgtgtggcagcgttggtggccagtggtgtggccctctacgccagctcctatgtgccctaccacatcatgcgggtgctcaacgtggatgctcggcggcgctggagcacccgctgcccgagctttgcagacatagcccaggccacagcagccctggagctggggccctacgtgggctaccaggtgatgcggggcctcatgcccctggccttctgtgtccaccctctactctacatggccgcagtgcccagcctgggctgctgctgccgacactgccccggctacagggacagctggaacccagaggacgccaagagcactggccaagccctgcccctcaatgccacagccgcccctaaaccgtcagagccccagtcccgtgagctgagccaatgatgtggcctagcggaagctgcctcctcaccctaggtgttgctggagaaccctgagggcagggcccgagccccgacacatcccttcccccaaaaagcaacacctgtgcttgcagccaggtcaggcccagctgcagcccaggcaggagcagtcgcctttcccacccacagcgctggccacagggctccctgcagggtcagggaccagaccacgcccagaggaggggaggcactggcccccgccacaggactggagacgcaagaacaaaaagaaccaagtagagagagtggagctgctttattgcccttggagcccgcgctctcggaggctgtcttctgtcgccaagggtcccggaccgagtacacagtggcagctggcttagttggtggacggcctggggtaggggagggtggcaggtataagacttctgggggcaccccaagaccccagacacccaagtggcatcttgggggtgggtgggcagaggacggggtaatgtgaggacgaagcgggcacggagccagatggccagtctccaggcctggtccacggactggcagggaccccaggcacaagagctgccacccctctgcccggttttggaaaaaaacaataaaggactgtcccctcaaaaccagccgggggactgttaaattggctcagggctattggttggcccaacactccgtgaaggtgctgggacaaggcagggagcaggggctggggcagggatggagtcttacttggcccactcgacgttgaggatgaggtggtcgtagccaaagccggacaccccggcaatggcacgcgcagcatcctcgcggcggtggaagctgatgaaggcaaagccctgtggaggggcgggatggggtcgggcacgagctaggacaggcgaccctaggacaagtgaccctcacacagccccaccgtgcctgcctgcctgcccaccttggattggccagtggtcttgtccttagccaggtagatgcgggagatggagccgaaaggccggaagagctcctgcaggtcggtctcacgcgtgtcctctgacaagttggtgacacggatggtggcgttgtcgtcggctgtgtgggagaggggaggtggctgtgagggggaggacactgcccagccctcgtgtgctgcccagccctcgtgtgcacgcttcggggataattacgaggtgccgggaggtgcccacccaccagcctggcgtcggggtgcccctcacctctgcggttgggctgcatggactccccgcggcggctggccccgtcgcgcaggctcggcggcacatacttccctgtcttgttctgcgtggcctgcaccggctctagctctggggaccaaaagacagtcaagttcaacctcactgtggcgcaggcgtggggacagagccgccccaggaagctcgggcttcagtgttgagccagcgcaggcactgtgtgccaaaccacaggcagccagttggccacgaggacaccaaggtgacacctgagaagctgacaccatttgagctcccagccagcgacactggtggaggaggaggaggaggagccccgaccccaccccagagagggcgggaggacaacaggggcagcagcctcacatgcacagcaacggcagacatgggacacacaacaggaacagcgcccaggtccccctcgcgtggcaggcgacaagtgcacgtctgcactctcacactcgccaccagcaaatcccaccaaagaattcggacggtacagccacaggcatgcaacggagacactatacacacagtgcgcacacacgatgtggggtggtcagcaccctggggccgacagacagcagctcatcaggacagtcacagggccaccagcaaagtcacagctgccaagtcgcacatatatgggagacgcccgtctcccaaccataggaggtacagccaattaggaaggcacagacgccccgaggagagtctggcaccatcaaacccgctgcactgtcgtgcgggagatgacagcacgaaggcagcagtggggacagaacccgtgcactgacagcaggaccctcccacccccacacctcccggcagcttctccttctcgccagtagacaggcccagctgctcggccagctccttctgcatgggccccagcgtatccttgtaggggcagcgggtggtccagtggtcgcccttgcagatgcggcaggacacgatcttctggcccttgagtttgttcatagggtcctcctcctcctggcagttcaggtcctggcaggggcgggttggggggagctcagaggcggctaaggcaccccctttgccccaccccaggatgccagccccacctgattgccccgcttacctctttgctggtgatgaacgtcatagagacatcgtcactgacagtggtggtggccacattgggtccgggggggtcaaactctgagttcccgaacttcttccagttctgggctcagggagggatgggggacagttgagggcaggggcaggctgggttccacagtggggtgccctagacctacaacagccacccccagagtgtctgggcctcaaaccccatcttcatcctcctcaagcactccctgaacagtcctggcgacagttgtttcctgagtacacgccaggcctgagctccaggaggcagggcagctgtcagcctccgggtccaggtgacagctacacagcgtggggcctgcgcagtctggcggaccagctcccaccagggcgcaatactcagggatgtgcaggggtccacctagacctccgggcccttgagctagacaacctgagcctcagcttcctcccttataaaacgggaaccacaaaagcttcctgcctccctgggctcctaaggagactgaatgagaaacacttcgtgcaaggtgcttggcatggggtatgttacaattaagtgcacagcaagctgttctaagtatacttattgctaacgcttcttccaaaaactgctgcgaccacctcctgcttccgttcctgcaggttgacaggccaagaggaataagaatctaaccgtggctgggcgcagtggctccctcctgtaatcccagcactttgagaggcgaaggtgggagatctctcaagcccaggagctggagaccagcctgggcaacatagtgaaaccccatctctacaaacaattaaaattagccggtgtggcagtgcacacctgtaatctcagctactcaggagggtggggtgggaggatggcttgagcctgggagttcaaggctgcagtaagctatgatcgtgccactgtactccagcctgggcaacagaactggacactgtgtctttaaaaaaattaaaagaatctaatttttattcgatatttacaatcgatgttatttgatatttattaatataatttgatatctatcatcgaactttgattagatatttatcatcatttatttagttgctatttatcgactgctgtgccttggacttttcagggccccaagacagtgcaagcaccccaggcctcagttcagcttcaacaaaataggtacaaagaggtaagcctggccgggtgcgatggctcacacctgtaatcccaacactttgggaggcctaggtgcgcagatcatgtgaggtcaggagttcgagaccagcctggccaacatggcaaaaccccgtctctactaaaagtacaaaaattagctggcgtggtggcacatgcctgtaaccccagctactcgggaggctgaggcaggagaatcacttgaacccaggaggcggaggttgcagtgagtcgagatcgtgccactgcacttcagcctgggggacagagcaacactctgtctcaaaaaaaaaaaaaaaaaagagttaagccccatctctaaacacaaagtccgggagcacggttttccaattcctctaggttagccctggggaagaagagcctcaccttcctccttgcgacagcctttgaagccttccgggtctcaatcctgaaggtgcggacaatctgaggatgggaggggagaagggtcaggctcctgggaccaagggatctcctttatcaacctcctcaacacaccccaccccattccggtctatgggcccccaagcacaagggtccccactccctgcaccccccaccctcaccttgaacttcttgccatcctcatctatcttgtactctgtcactgtctttatgtttccgttgatgacctccttgggaggcggcagtggagctggcagaaggggaaaaacagagaaagactgagccctgggtcatggggatcaggagcggcagggctggagggagaggcagcccggacaccgagtggcagtcctcactcacctcccggcagtcctcactcacctcccggcagtagctctggctctgggctggtgtcacctgtggccagagggatccccttgaggagctcgctggtgacacatttgtctgcaaaaggcagcgtaggaaggaggagtcagctccaggggcaggagctccccagctgcgatggaagggcttttgggatgacgcctacagcaaaagcggagaaaggcaggccaagggcagagggctggccaggcaacgcactgggatggccctgtggggactcggagtggcaaggatgggagatccctcgtaggaaggtgggtgccaggccatgaagccaaccaggcgccagtagagaaacaggagacgggagattacaacttcctccctggaggggaacagctgggaggcagtggcatgggaggaagagggacccgccggggaacacctggagttggcaacaggcgggtcccaaggaggatggcgcggggcaggggcagaccgtgacggggtacacggtgccagactgggagatggaagcaggcggcagtcacacggcttgggcctggccgcgaataccccgggcgaccgtgtacacttaccgtcctccccctcctcctccacctggtcggcccaactgggcttcgaactgcggaaacaaatgtgtggggaacgaagattaagtcagccaggcccggctcccgcagcctcggcgtacccaggccccataatacttcccagagcaccccaaccgcttcccgtgcccctttccgcgatcgccgactcactcaaagtctccagtaggcatcgcaaaaagtattctccacgcagcccaagcccggccagagagcggaagcgggcgaaaacgagacttccggtgccgccgtcgccgcctagaggggcccagccgcggcacccacagcgacacctgcggacggaggtggaggcgcacgcggctgtgtatgctactgggcgctgctggtaccagagtagggccagcgggggcagaggctgatttcagggctggtcctattaacctttaaaattaaaataggccaggcgaggtggctcaagcctgtaatcctcgcactttgggaggtcgaggcgggcggatcacctgaggtaaggagttcgagaccagcttggccaacgtggcgaaaccccgtcactactaaaaacacaaaaattaactgggcgtggtagtgcgtgcctgcagttccagctactcgggaggctgaggcaggagaatcgcttgaacccgggaggcggaggttgcagtgagccgagatcgcgccactgcactccagcctggcgacagagcgagacaccgtctcaaaaaaaaaaaaaaaaaaaaaattagccaggcgtggtggtgggcacctgtaatcccagctactcgggaggctgaggcgggagaatcgcttgaacccaggaggcggaggctgcagtgagccgagatcgcaccactgcactccagcctggggctgcagagtgagactccgtctcagaaaaataagtaaaattaaaataaataataataatcataaagctcacttattgagtgcttattgtatatgaagcatggtgaggaggatattacttccattttacagctgaagaaactgaggctcagactgggtgcagtggcgcctgcctgtaatcccgcactttgggagaccaaggcgtggggatggcttgaggccaggagtttgagacaagcctgggcaacatagtgagacccctgtctctaaaaaagaaaaaaagaaaaagaaagaaaaaagaaaccaaagttcggggaaaacaatccttttgcttaaactgttccttgtcttctttcccgatcccaatgattcagatgccaagtggcctcccctcagccactccctcttcttttctttgtagcattcttggctttccggtataattttgtgcatttacttgtttattgctcagctccttgctctaagcacaaccgtcctcagtcgaagtgattcatgatgactccccaggggaaaaaactggtcctcagggaggaaaaaaatcttagatattgtggtcttccaaagccagctctatcagacagcatttatccctaagtatttagtttctgcctttagggagatattaaatgtaattaaattgaaattaatttagttgatgtaaattcaattttaggataattcgggttttctcctaagaagggtgataatgaacaaaaaacgtttgacaatgtcggacgcagtggctcacgcctgtaatcccagcactttgagaggccaagatgggcagatctcttgaagtcaggagttcgagaccagcctgggcaatatggcgaaaccccgtctttactaaaaatacaaaaattagctgggtgtggtggcccgcgcctgtaatcccagaactttgggagactgaggcagaaggatcacttcagccctggaattcgaccagcctgggcaacacatagtgagaccccccatctctaaaaaacaacttttttttttttttttgagatggagtctcactctgtcgcccaggctggagtgcagcggcgcaatcgcggctcactgcaacctctgccttccgggttctagtgattctcctgcctcagcctcccgagtagctgggattacagatgaccaccaccacgccgtgctaatttttgtgtttttagtagacggtttagtagagacgggggcccacctcggcctcccaaggtgctgggattacaggtgtgagccactgcgcccggcccttaaaaaaattttttttttttaatcagctgggcatagttctgtgtgcctgtagtcccagatactcaggaggctgaggtgggagaacagcttcagcccaggaggttgagccatgatcatgcgactgtacttcagcctgggtaacagagagagaccctgtctcaaaaacacacacacgcacacacacacacgcaacaaaacaaaaaataacttgtaagggagaatgccctgagaaaaataaataagaagacaggaaaaaaaagtttatgcttttttatcctctgagttgtgagtgaggaggccactcaagtgtttggaatatcaccaacttttcttgtggaaaaaattattctagaagcctgtagagagccaagtggaagggaaaacattagctggagagcaggaaagagaggcacgccgctgtggcctttcaggagggtggcctggctatattggtgaaaatatgaagctggtccaaaggactgataaacatttttacaagcttactcaaatgtactctgagcaacacaaaatccaaacaacccagcagattgggcaaagcttcaaaaattcgatatcaccccgtggtagtaaagatgttatagggaaacaggctgggcacctgtaatcgggaggccgaggtgggtggatcacctgaggttaggagttcaagaccagcccctggccaacatggtgagatgccgtctctactaaaaatacaaaaaaaaaaaaaaaaaaatctggccatggtggtgggtgcctgtaatcccagctacttgggaggctgaggcaggagaatcgccattgcactccagcctgggcgacagagcaagactccatctcaaaaaaaaaaaaaaaaaaaagaggaagcgatatataaaatggcatatattacaggaaccaatttgtgtaaatcttcaacagcacatagatatgcagatatatgcaaatcatttcctggaaagaaagaatcagaacctgttaatgaggaatgctttggaaagaaggcaccaagaaaggaaatattatttttggacatgtattaatatataatatgcatttatgtaatatatgtgagatgtaacatataaatatatttcttggctgggcactgtggttcgtgcctataatcccagcagttttggaggccaaggcagaaagatttcttgagcccaggagttcaagaccagactaggcaacatcattgagaccccatcactacacacaaaaaattgctgggtgtggtaatgcacgcctgtagtcccagctacctgggaggctgaggtaggaggattgcttgagcccaggaggtcaaggctgcagtgagctatgattgtgccattacactctggcctgggtgacagagcaaaaaccctgtctctaaaaaagaaagaggctgagcacagtggctcacgtctgtaatcccagcactttgggaggccaaggcaggcagatgacctgaggtcaggagatcaagaccagcctggaaaacgtggtgaaaacccatctctattaaaaatacaaaaattacctgagcatgttggtgcatgtctgtaatcccagctactcaggaggctgaggcaggagaatcgctggagcccaggaggtgaggctgccatgagccaagtgctgggattacacaggtgtgagccacatcaaggtttgggtgcaagagtacatctggttatagattacagaagcataataccctgaccccattagatgttattttatgtgtaggaaaaggtttgaaccaggtccttttttttttttttttttttgagatggagtctcactctgttgcccaggctggagggcagtggcacaatctcggctcactgcaagctccgcctcctgggttcacgccattctcctgcctcagcctcctgagtagctgggactacaggcacccgccaccacgcccagctaatttttgtatgtttagtcgagatggggtttcaccgtgttagccaggatggtcttgatctcccgaccttgtgatccgcccaccttggcctcccaaagtgctgggattacaggtgtgacccacccgtgcccggcccaggtcctttttttcttttttcttttttttttgggggacggagtcttgctctattgcccaggctggagtgcagtggtgcgatctcagctcactgcaacctccgcctcctgggttcaagcggttctcccgcctcagcctcctgagtagctgggattacaggcatgcacaccaccacacccggctaattttgtatttttagtagagacgggggtttctccatattggtcagggtagtctcgaactcccgacctcaggtgatccgcctgcctgggcctcccaaagtgctgggattacaggcatgagccaccgcacctggcacgcctttttttttttttttttttttttgagacagggtctttctctgtcacccaggctggagtgcagtggcacgatcacagctcactgcagcctcaacctccccaggctaaggtgatgcccttgccctggtctcccaaaatgctgggatcacaggcatgaaccaccgtgcccagactcatttaaggaatatagtgactcgggcaagggacatggtgtgccctgtgctctgtcctgttttgtcttcaaagccttgttctgtagagctgcgcagacgtgtctcacgtgtctcagagtcaggggctttgtgaaattacgctggaaagcagaattgagcaaacccagcttaacattagttactttttctcacattttcacaacaaaatatcacagactaggaggcttaaacagcacacatttattttctcagttctggaggctggaagtccaagatcacagtgtcggcagggttggtttcttctgaggtgggggcaccttctccctcggtcctcacgtggcctcctctgtgtgtgtctatgtcccaatctcttcttctaaggacatcagtcatattggattagggcccaccctaatgacctcatttaaactttttttttttaattattttttttaaaggtgaagtctcactctgtagtccaggctggagtgcagtggtgcaatctcagctaatggcaacctccacctcctgggttccagtgattctcctgcctcagcctcccgagtagctgggtctacaggcatgtgccaccacacctggctaatttttgtatttttgtatttctagtagagacggggtttcaccaagttggccaggctggtctcaaactcctgatctcaagtggtttgcctgccacggcctcccaacgtgctgggattacaggcataagccaccacacctgggtttaattttctctctaaaggtcctgtttctgctgggcacagtggatcacgtctgtaatcccagcacattgggaggccaaggtgggcggatcccttgaggtcaggagttcgagaccagcctggccaacatagcgaaacccctgttgtctactacaaatacaaaaattagccaggtgtggtggcaggcatctgtaatcccagctgctcgggaggctgaggcatggcaatcccttgaacccgggaggcagaggttgccatgaaccaatactgcgccactgaactccagcctgggcgatggagtgagactccttttttttttttgagatggagttttgctcttgttgcccaggctggagtgcagtggcatgatcttagctcaccgcaacctccacctcccgggttcaagtgattctcctgcctcagcttccctagtagctggaattacaggcatgtgccaccatgcccagctaattttgtatttttagtagagacggggtttctccatgttggccaggctagtcttgaactccaaactcaggtgattcgcctgtcttggcctcccaaagtgctaggattataggtgtgagccgccgcacccggccaagactttgtaaaaaaaaataaaaataggccatgcgcggtggctcacacctgtaatcccagcactttgggaggccgaggtgggaggatcacttgaggtcaggagttcgagacgagcctggccaacatgatgataccccatctctactaaaaatacaaaaatcagctgggtgtggccaggcatggtggctcacgcctgtaatcccagcactttgggaggccaaggtaggtggatcacctgaggttgggagttcgagaccagcctgaccaacatggagaaaccctgtctctcctaaaaatacaaaattagctgggcgtggtggcgcatgcctgtaatcccagctactcaggaggctgaggcaggagaatcgcttgaacccaggaggcagaggttgtggtgagccgagatcctgccattgcagtccagcctgggcaacgagaaggtaactctgtttcaaaagaaaaaaaaaaaaaacagctgggcgtggtggtgcgtgcctgtaatcccagctactaaggaggctgaggcaggagaatcacttgaacccaggaggcggaggttgcagcgaaccaagattgcgccattgcactccagcctaggcaacagagactccatctcaaaaaaaaaaaaaaagtaaatagagataaaaagaaagaaatactaaattgatggacatgcagatgtggtaacagccaaaaaacaggggcagaaaggagacgtggcaatgtccttactgtggtttttctagggaagtagatgggcacctcagccttacatgtttatttcatttaaaaaacagccttccactatgaactatggtatggtggttcctcaaaacattaaaaatagaaccaccaaatgacccagcacttccacatctgctttatacttacaagaattgaaatcactggagaccagcctgggcaacagagtgagacgccatctttacaaaaaataatcatatattaaaaggaaaaaaaaagaagccaggcacggtggcttacacctgtaatcccagcactttggaaggatgaggagggacgatcattggagcccaggagtttgagaccagcctgggcaacatagcaagaactcatctttactaaaaataaaaataaaaattagttaggcgtgatggtacatacttgtagtcccagctactccagagactgaggttgggggatctctggagcgaaggagttcgaggctgcagtgagctatgatcgcatcactgcagtccagtctgggtgaaagaacaagaccctgtctctaaaaagaaaagacaaggtttctaattcttacaccaaaatacatcctcaagttgttcttggtgaaggatcgtatacctgaaaatgtgaccactgaaaaagtgggattaaaaacaaggaaattcaggccaggcgcggtggttcacacctgtaatcctagcactttgggaggctgaggcaagcggatcacccgaggtcaggagttcaagaccagcctggccaacatggtgaaaccccatctctactaaaaatacaaacattagctgggtgtgatggcccatgcctgtaatctcagctactcaggaggctgaggcaagagaatcccttgaacccaaagatggaggttgcagtgagcagagatcgcgccactgcactgcagcttgggtgacagagtgagactccatctccaaaaaaaaaaaaaaaaaggaattcaacaagttggttagattcaaaaaacacagtttacaaaatcacagccaatacaaatggagcatctctccataggcaaaggaccatggtttagaaatcaagaaaacatcccatttatattagtaatgaagggactaaatacttaggaatcaagttatgaagtctgcaagatctggatgaaaagctgtggacacaaaggaattcctgaacaaacaggacaaaccctgttcttagaaaggaaggcttgtcattaacatgtcaattcttccagaagtctgcaaagttaatgaaatccctataaaacacctgcttgacttttagcggctgtgccagttctaaagtttcaatccagtcattcaactcctagaaaagtagcctagacgtggatacacatgtgtatacaaatctatgtccagccatccctcggtatccccaggggattggttctaggaccccatgtggtaccaaaatcagaatgtgctcaaatccctaatataaaatgtcataggccgggcatggtggctcacacctgtagttccagcactttgggaggctgaggcgggtggatcatttgaggtcaggagttcaagaccagcttgaccaacatggtgaaaccccgtctctactaaaaatacaaaaaaattagccgggcgtggcggcacatgcctgtaatctcagttacttgggaggctgaggcaggagaatcacttgaacccgggaagcagaggttgcagtgagccaagattgtgctactgcactccagcctgggcgacagagtgagactctgtctcaaatataaaataaaataaaataaaataaaatggcatagtatttgcatatacgctacacatattctcctgtgtacactactttttgacagagtcttgctttgtcacccaggctagtgcaatctcggcttaatgcaacctccacctgctgggctcaagtgatcctcccatctcagcctctggagtagctgggactacaggtgtgtgccaccatgctcagcaaatttttgttattttttgtagagaaggtgtttcgccatgttggccaggctggtcttgaactcctggcctcaagtgttcctcctaccttggcctcccaaagtgctgggattacaggcatgacccactgcgcccggcctctcctgtgtactttatgtcgtctctagattatttgtaatacctgacataacgtctacacgttgctttattctcatggattccatgtagtacttggtaagtggcaaatacaagttttgctttttggaactttgtggaatttttctgaatattttaaatctgtggttggttgaatgccagaggtggaacccttggatacaaaggcctgacctgcatcacaattcaatctactgctcttgagactgtagttgtttccaaacaatataaagaaaaaaagttcaaataaaggctttctaagagatttattgtataacatagtgagtatagttaatatattcttgtccaggcgcagtggttcatgcctataatcccagcatttggggatgccaaggcaggtagatcgcttgagcccaggattctgagaccagcctgggcaacaaagcgagatcctgtctataaaaaaatataaaaatcagctaccaggcatggtagctcatgtctgtaatcccagcactttgggaggccgaggcaggcagatcgcttgagcccaggagtctgagaccagcctggccaacatggcgaaaccccatctctactaaaaacatagaaattagccaggcctggtggcaggcctgtaatcccagctactcgggagactgaggcatgagaatagcttgaacccaggaggcagaggttgcagtgagccaagatcgcaccaccgtactccagcctggtgacagagtgagattccgtctcaaaaataaataaaaataaaaataatgattagctgggtatggcggcacatgcctgtggtcccagctactacagaagctgaggtgggaggatcacgtgaggccaggagtttgagaccaccctgagcaacacagtgagaccccatctccacaaaaaaaatgtaaaacttagctgggcatggtggcatgcgcctgtagttccagctactcaggaggctgaggcaggaggatcacttaagcccaggagatcaaggctgcagtagaacatcgctgcactccagcctgggcaacagagcaagatcctgcctctaaaatatatatatattttttttaaaaaggacaaaactgatacacatattaatgacatggatgaatcccaaaggcatttatgctgaaagatctgaaacacaagagcccatgctggcctgaacaggcaggtgtcatctatggagacaaaactggatgggaggctgcccagggactgggaagggggagatcaagtgggaagaggcacaaggtgacctgaggtgacagagacattctctatcttgataaggatataggctacagtgctatgttcacttctcgaaatttaagctgaacatttaggactcgcatatttcatattctaccccaattttcaaaaatagaggaacaagagagattcctaggtaagacaaccttcgaggtgcaagacagtttatttttttttcgagacagtctcgctttgttgcccaggctggagtgtggtggtgtgatcgtggctcactgcagccgccgcctcccaggttcaagcaattctgcctcaatctcccaagtagctgggattacaggcatgtaccacacctggctgatttttgtatttatactagagatggggtttcaccctgttggccagggtggtcttaaactcctgacctcaggtgatccacctgcctgggcctcccaaagtgttggaattacaggcgtgagccaccgtgcccggcccaaagcagtttatttttgagacagggtctcgctgtgttacccaggctggagtgcagtggcacaatctcggttgcagtgagccgagattgctactgcaacctccacctcctgggctcaagcgattctcccacttcatgctcctgagtagctgggactacaggcacgtgccaccatgtcccactaagttttgtaaaggcaatcttaatagacactatcaccaggcgtggtggctcacgcctgtaatcccagcacttttggaggccaaggtgggtggatcacctgttgtcaggagtttgagaccagcctggccaacatggtgaaaccccatctctactaaaattagctgggcgtggtggtaggcgcctgtaatctcagctactcgggaggctgaggcaggagaatcgcttgaacccaggaggcggaggttgcagtgagccaagatcatgccattgcactccagcctgggcaacaagaccacaactccatctcatttaaaaaaaaaaaaaaattgacactattggctgggtatggtggcagatacctgtaatctagcactttaggaagccaagcgggaggatcgcttgaggccaggagtttgagaccagcctaggcaatatagtgagactgcatctctacgtaagtaaaaattaggcctggtgtggtggctcatgcctgtaatcccaacactttgggaggctgaggtgggctgatcacttggggtcaggagctcgagaacagcctgggcaacatggtgaaagcccgtctctaccaaaaatacaaaaattcgccaggcacacgcctgtaatcccagctacttgggaggctggggcaggaggatcccttgaacccgggaggtagaggctgcagtgagccgagattgcgccattgcactccagcctgggcaacaagagtgaaactccatctcaaaaaacaaaacaagaattagctacatatgatggtacagtcctgtagtcccagttacacggaggcaggggatcacttgaacccaggaggtggaggttgccatgagccgagatcaggccactgcactccagcctgggtgacagactgagaccctgtctcaaaaaaatagaaaataaaaaaagataataggtacatgggtgattgttttctcacaaggtcacactatgcattagtacaaagattcagttgtcttgatcaaggtgccttggaatccagaaaaagaaaactcattatactcattatatactttaaaatgaattttttagcttaaaatagcagcagaaagtatatttaaaaaaaaatctcggatgggggaactttaccatatgtcaagctgagctgttgtactttgctgtgtgcatttgctatcagtcttattcaaaaaataagctgagatccccatttttagtccttacaaaagtgattcatgtgttaaaatgggaatgtcagaaatgtggaagaagatacatgtttaagatctcttgctggggggaggaaaggcgtttctaaataggctacaaaggccgggcacggtgactcatgcttgtaatgccagcactttgggaggatcacttgaggtcaggagttcaagaccatcctggccaacatggcaaaaccctgtctctactaaattaacaaaaattggccagatgtactggcaggcgcctgtaatcccagctactcaatccctgctacttgggaggctgaggcaggagaattgcttaaacccgggaggcggaggttgtggtgagcagagatcacaccactgcactccagcctgggcgacagagtgagaatccgtctcaaaaataaacaggctacaaaaaactaagagtgacaaatataaattgacttcctaaaaatgggaggtctctgtatggcacagacatgataagccaggatgactgagcaggggcagtcatcccaaatgcccagggagctcccagcaaagacagtcatgtggccatcacagagaaacggtacatccagtggccaaaggacacacagaagtgttatgtcactattaaaaaatgctggccaggcatggtggctcacacctataatcccagcactttgggaggccgaggcaggcggataacctgaggtcgggagtttgagaccaccctgaccaacatggagaaaccccgtctctactaaaaatacaaaattagttgggtgtgatggcgcatgcctgtaatcccagctacttgggaggctgaggcaggaaaatcacttgaacctgggaggcggaggttgcagtgagcagagatcgtgccaccgcactccagcctgggcaacaagaacgaaactgtctcaaaaaaaaaaaaaaaaaagctaatgggaggctgggtgcagtggatcacacctgtaacccagcactttgggaggtccaggtgggcggatcatgtcaggatttcaagaccagcctggccaacatggtgaaacatcgtctctactaaaaatacaaaaattagctgggcgtggtgatgggcgcctacaatcccagctactcgggaggctgaggcagaatttcttgaacccaggaggcagaggctgcattgaacggagactgccccactgcactacagcctgagcaacagagcaagactgtctcaaaaaaaaaaaaaaattctttggaaagaaaaaaaacccaactaaagaggttttgcttggggatggggtggccggggctccaagggcagctcagtggtgacttctctctccttattccaccagttgcagcacagagctctgcctcatggtcacaggatggctgctccactgccaggcatcacaacccacttcagaccaaagaaggcctaccagccacggggaaggccagccaagacttcctttaaaaggctttcctggaagctacactagcaagttccatttgcatgtcatggggatcaactcacgtgactcagttctgaacaaacacagacagacacacggagtgtctagcttcaaacgtgctagcttcaaactccacgtgggtcgccttcagcatggaagagcttgttcctgtctgacctcagccagaagtcccgtgcaaatcacgaatacccacccagggtggtttataggagagatttatttgaagaaatattacaacatataaaaactacataaagtcttaatttccactcatacagtggtagatttgatataatgcataataaaaaacttttaaaatccagaatgcacaaagtactgcacaatttgatcactaaatcattagttgataagcgaacctcacacaacagcttcatgtcagccaaggccacaaacaccatgtaccacacatgtgaacggacagattgacatgttaaaaacacaacatcagtgcatgttggggattcctggtgccagaaacaggggtgacgggagggcagaactagtccttagcagcttcctcctcctttattttagctgaagggaaataaaaggaaaagtcactctggggaacacgcccggtgtcacgccacttgacaggcgagtaacagacatggaccatcaggaaacattaacgtactgatgttaacagctgacccaataagtggcagagtgctaagggaacgttcacggagactgaacactcctcaaacggtccccagagggttctagacccagaggctcaagtgagcagctgaggcaggtgcctgctgagccaaattcaccgagcaggagtgagggaaacggccccagggccagcccagcagccaacctgaccaaaggcctgctgtgtgcagcacgcctgctctaagcacttgacacgtgcaactcactcaatcctcacagcagccccttgagaaagatggggccacgaacgtgggtaggtgacccgcctgagtcccagagcccaaaacggtggccagcaactgcccccacatgtacccccagagggcagtcaggccccagaggaagcctggcccaccccaccatacctgaggcactctctcgggctttggccaacatacaaagcttgatctccaagccaatggctttggccaggggcggtggcacggcattgcccacctgcaggaggggagaagggcaatgcctgatgtggacacccaggcccaaggcccgggggcaggtgtactgccagcccctgctcagatggaggacaacctgggcattgcaccccttggggaagggttctggtcctgctcacatgggcccaaaacccttccagcacaagatccttggaccctccaactggcccatcatcccgccccacagccacaagtcactgggcctttgaagagcttcagaaagacttgagacaaagacacgtggggctgggagcagtggctcacgcctgtaatcccagcactttgggaggccaaggcaggtggattagttgaggccaggagttcgagagcagcctcgccaacatggtgaaaccccgtctctactaaaagtacaaaaactaattagctgggcatggtggcacatgcctgtaatcccagcacctcaggaggctgaggcaggagaatcacttgaaccctggaggtggaggttgcagtgggcagagatcatgtcactgcactccagcctaggggacagagtgagaccctgtctcagaaaaaaaaaaaaaaaagacaaatgggccacctagacacgtttcgctcccagttaagagtggctgcttccctggccggcgcagtggctcatgcctgtaatcccagcactttgggaggccgaggcaggcggatcacctgaggtcaagagttcgggaccagcctggccaacatggtgaaaccccatctctactaaaaatacaaaaattagccgggtgtggtagcacatgactgtaatcccagctactcaagaggctgaggcaggagaatcacttaaaaccaggggggtggaagttgcggtgagctgagatcacgccacttcactccagcctgggcgaaagaacaaagctccatctcaaaaaaaaaaaaaaaaaagagagagtggctgcttcccgagaaccagattcggggggaggggtgaaatgtggttttcacaagaaccgtggacactggtttttaagcaatgcgcgtgccctatgatgaaaatacacttaactgagactaactcatagactaacttgttaagccaacccgacacctgagaagcaggtaggaattaaggtgctagttcatttgaacctacagcgagtgagctgtcgccaccatgggttttagcctgctcctttagcgcgacggactgtccttctggctcaatctctgcctcaaaaacaaacagtaaggaaccagcatagggacgcagcctgactcggatgtctcagcactgtccctcctgtgggccgtcttcccactgagagtgatggggctacccggcagccagcaggcgtcctcccggaagtgactgcgctggccccagccccacctggtgacaggcacagaagcctccttcctgtccagacccagcgggcgccgccccactgacctgccggtgcttgtccaggatgttgccgaagagccggtaggtgtcagggaagccctgggagcgggcacactcccgcacgctcaccacacggtgctgctctgggtggagcacgcggccctgggggaaagaggcgcggtgggcgagggcagtagcacccaggccgggtcaccgtcggggacagggagggaaatggcactgtgacagcatacggccatggccttggcctatgagcttgtcccgtggacgtggaggggcaggaggcagaggccaggtgcctggggtcctggggtgctgtcccccacttggctaaacccacacttccacctagttaggccgccaagtacagggcctgacccaggccctcggatgccccctccccacctacctgcttgcccatgggctcggggttggtgacggttgtgctgaagaagccgtcccactcgagccttccatagaggccagcccagtggttgtgccggttcccggtgtggggcaggcaccaggggatgagggtgttgaactgcctggctgcggggtcgcaggctttgccggctggaagacaggacagtgatgaggctgcagttgtgggatggggtataggcttgggacagtggctcttagagctttgggaggcagagatggcacctcctgtgcaaggggccccctggggtggagcagccaacaatcctcgttctctgggcactgtttttattattagtattatatgtctcgctctgttgcccaggctggagtgcaatggcatgatcttggctcactgcaacctctgcctatggggttcaagcgattctcctgcctcagcctcccaaatagctgggattataggcgtgcgacaccacgcccggctaatttttgtagttttaatagagatggggtttcaccatgttgggcaggctgatctcgagctcctgatctcaagtgatctgcctgccttggcctcccaaagtgctgggattacagaggtgagccatcgtgcctgacctgcttttattatttatttattgttttttttttttctttttagagacagggtctcactctgtctcccaggctggagtgcaatggcacaatcacagctcactgtagcctcctcaacctcccaggctcaagtgatcctcccgccttggtttcccaaagtgctgggattataggtgtgggccatgaacccagcctgcttttactactcaacatggtcagcagctaccttctctgggacacccaggcttggtgtgtctgtgccctgccctggcctccaggttcacaggccaaaggcccagggctctgccttccttcccctcagcccaccgggaaccacaacttacaggacccaccttccacgcaggagcagaccccacggagggccccagagctgctgcggccgttcttcctgtcatggtgggtataccgcagcttcctggccatggtgccgtctgagagccgcacctcgatgttgggcagatcgcgccagtctgaccctggggccaaggggatgtgccgcatgcgggcagccaccaatgcactcatgtcctgaaagagtgtggggggcccagctgtcacctcatgtgagcagcatccgagcatccatggtgggctgggagctgggaacaccatggtgaccaggaagccccctggggctcacgcccatcgggaaagagacagtcagggatatcgcacttggctcgaggccacggcagggacctgaggcagcgcaggtgtaggagagcgtgggaatctaagctgagcctttagggtgggggaaggggagtggtgccaggggatggtgaaagggctggtcttggcatcctgggaaaacatgcggggagaggcagcaagggggaaggcagtggtgggtgggcagtggcttgacaccattccagaccaagtccaggactgcgggagctctgacacttcccatgaccatgcaagagagaccaggggtcacacaaaggctgaggactcgggaggaggagcctgggatcagattccatgtctcccctgagtcttgggcaggctgactgttcccacgaggctgctgggctgggcctcgaggaggagccgctctgtcagggtgccattaccttacagatgtggtccctgaggatgggctggtactgtgcgccccggagctgcctctggaaccaggactgaggctccccgttgtaggagatctccagtgccgaggctccattccgcacctccggcaggtcggacatcgtgtctcgcaccgtgatggtccggaaaggacccgagctcaacctgcaacagaggaggaggtcaacacctctggagatgcacgcagcagctgtcccctcatcacaggtgccaccccctgcctgctcagatggccttctcccgagatcacagcactgcccgaggtcacatgggtggcagtgtgcctggatgccatctggaaggggggatggggctatggcgtgggctttgtggatgaccacagccaagcatgcggctggccgctctgcacatgctatctactagggaagcagatgatgcagggtcagaactggagaccacaggtggcagagtgccatgtggcagagcaccgtgtggcagggcagatgctgtaccatcctctcctccccaagcctcaccagggagtactcacgggccccatgagctactgaggcctgctcggcagtgtgtggaggagcgacgggggccacctacctggttatgttgctcacaaacttcttgtcatccaccaccacgctcagctggcaggcccggggagcaaacacgtgcagtggctccgggaacagagggagcttctctccaggggccgcggccaggatgatggcccgcctcctagtctgggccacgccgtactgaccggcctgtgggggagaaggacggacaaccccaccgtcagtgggacactcccaactggactggccagacccaggcccagggtcagcagcctgagtcgggagtggctggccaatgcggagtgcacttgcagaaatccccagttacctcagcaggcgtgctcctggtcagaggagtttggagcagataaagaacaaaagcagctgagcccaggggacagccactggggaaggtgggagcaaaccctgcggggaagtccggccagctctgaaagcactgcaagggccccaaggtcttagcactcggggagaacactggagaccaggagccctgtcgcttccctgatggctgtggtcacaaggacagagaacgtggctgcaacaagtcttgtctggtgagcctgagtcgccctgaggctgagctaggggaccgggtagccaagtgcttgcccacttaggcagacatcctgtgctagcatctggatagctgtttcatttttaattatgccctcaattgctgagctgatacagagaggatgggggatgcttttcagataaggcctgggccccacagactatgtccatccctgtccctgcagacacagccacctggagtgcaaccctcggccatctgtgggggtttgtgtgcgcagttacccagagcaaaactgtcttttaaaccaatcgaacagctgccgcctacacatggctctgcgcacctcacttcccctcccgctctgtgcagactcagccattccacagtgctccatggtgggctgctcacccttccccatcgagggaaaggagccaggagctgcatggcgagaagcccattgtagccagccctcccaggcatgttcgagaacacagctcaagagacactagcggtggacttgctgggggccggctgagcacgcatctcccctgactccgccagtgggacagagcaccatgccagcctctgctgcctggatggcaggcctatgccattgaaccctgccttcagtaagggatggctggctgctggccgggtcacgtgctggccacatctgtctgcccgccccagccccagggcccacctgcagcacgccgaaggtgcactgatagcccatgcggaccaggcagcggagggtgagcttcaggaccatggagcgcttgaaggagacaaagttcctgacattctccaggaggaagaaccggggccggtagtagtcgcagtagctgtagggggcaggagagactgcaggagtcacctccacagacagagggaagaaacgacccactgtgccggaagcccctcacgaatgttatcaaagtctctccctggtgagagctgagctgtgagcttccggggggcagaggcctcagtgcagggcgaaaatgaccactgctgacatgcggcacagccccgggccgtctggcaacactggggggcttctacccgtttacctgaggaaggaaaccaccagagagtttttgaacttggagtaggtgcgcgaattgaagcggttcatgccgctgaagccctggcagggcggcccgccgcacagcatctccacgtctcccttctggggcagccgctggccgcgggagttggtggtctccccagccatgaccagcttcagcaggatgttgcagtcctctgtgaacactgtggagccggggttgttcagccggaacgcctgggccgcagggtcccacatctcgatggcccacagcgtgtcagagatgcctggcagatcaagcacgaagccatgctttcaactctccagaagatttttttttttttttgagatggagtctcgctctgtcacccaggctggagtgcagtggtgtgatcttggctcactgcaagctctgcctcccaggttcaagcgattctcccacctcagcctcctgagtagctgggactacaggcacacaccaccacgcccagctaatttttgtattcttattagagacggggtttcaccatgttggccaggatggtctcaaactcctgacctcatgatccacccacctcggcctcccaaagtgctgggattacaggcgtgcgccaccgtgcctggcctcggaaggagattcttgagtcaggaaggtgaccggggttggaagtcgtttcaggtagcacctgcccggtctgggctcaccaggtattcagagatggagcctacgggcgctcacctgcttggtggaatccctccgacaaccccccgcagccagaaaacacatccagggtccgcagcttgggcagcttgatctctatctctggctcgctcggctcacaggcttgggacttgggcttgcccttccctgggggagagaggccagaggctaaacccgatcctcagagtccaagtccaccttgctctcaagcgccttgttaactcaggcggcctcgctgtcccagagtcagtaacaccagaggtggttttacactgagggattcacaggcagcctccaagttacagaagaataacttgaaaagaaactcatacaatgacgtaccttttcccttgcccttccctttgtttccagggctacgggcatggttgggaggatcttcaaagcttttgctctttgcattataggcctgaaaaggagagaactgcaatcgtttgggagagaaacgcactgtcccctctctaacgcagactagtaagaaggcaatttgatagtcacttaatttctccctcagtggggccatgaccaattagccaccaataagagtagtttgactttgctacaatagaaacttaaaacaatccattttattaatactaacatttgatctggctgacactgaaatgcctattacaagcacttgagagtaccttctagaacaggaaaaagtgctatgcagaatctgctgtccaattgggctacctcatccatgcctgggagaacgtggatgtatcgttttaaggtaacaacacggaaaggccaagccccaacaatttacaagtcatgagcttgatcagctgactcgtgggccctctccataacgagggccacccgcacaggcatgtgggctgggcctggacgtaggcgcctggcccaagggacccaggagcaggggcaccttctccaactcatactaagacaccagtcaggctggtggaagctgcctcatggtcctcaacgttcagttgcaccaagacactaaaacgttaggttctctaatgacgtactttttaaaaaccaggagtgttaaactccgggaccacttgaatctcatacaacttgtgctctggagaaccctgctcagacccccgtaaagctcctgcagaacagcttcacgtcagccaaccacccacttcttacaaaagctgaaaccctgcagccaagccgccttgtgtataacccgacatcagactccttctggccaactttgaccccgaagccttccctctagcaagcaggggcaccacctcgaggaagtagaagcggttggggccgcccatggagtacacctggacgcactcgggcaggtcctccccatactccacggtgcagcggccctgcacagccttgaagtccaccacggcctcctcgtcgctccagtagagcaggttgatgtctgcgtggtagctcgctggagtggacttgtgggtgttctcaggcctgcgagcgggagaggcctcgttaggagctctcctttgtggtgagcttatgctgaattaaacagtaccatgttcctggggtgctcagggaactgcagggtaaagaccccctagttcgagaaccgcagggtaaagaccccctcagttagggaactgcagggtaaagatatctcctccccacactggggaactgcaaggtagactcccccccatttagggaactgcagggtaaagaccccccctagttagggaaccacagggtaaagatcccccaagttagggaatcgcagggtaaagacccctcccagtaagggaatcacagggtaaagatatcccctcctcacattagggaactgcaaggtagattcccccacaattagggaaccgccaggtaatgacccccgacccagttgggaaccgcagggtaaagaccccccagttatggaaccgcagggtaaagacctccccagttagggagtcatagggtaaagacccccctacttagggaaccgcaggtaaagataacccctccccaaatgagggaactgcaaggtagattcgcccccaattagggaaccacagggtagagaccccccaaccattaggtcagcttggctgcttgctctgcacgcctggccctgccctgctgtgtccgcctgccggtagcagcctctcgagtgtgtttctctcacctgtaccactcacagcccttgttttatttcctgttattacaaaggcttcaggaaatctttgatctatgttagctaagaggtgaggcaagtgtatagcttcctgtacaggctagtttcaggttaatgcctaatcaccgcaagttactcgggtcttagaaaaagaaaacgtaataggccaaaagcttaggaaagagaaaaaatcccagagacagaaaggaggacctgggaagaggtggggacagcgggacagaacctggacagtcatagatggagcttgggaggttctctgggggtgcccaggcactctacccgttttttcttttgagacggggtctggctgtcacccaggccggagtgcagtggtgggatcatggctcactacagcctcaaattcctgggtttcagtgatcccttcagcctcagcctcccaagtagctgggattacaggcgtgtgccaccacgcccagctagtctttttttttttttttttttggtagggccggggtctcactacgtttcctcaagctggtcttgaactcctagactcaagtgatcttcctgcctcagcctcccaaagtgctaggattagaggcgtgagctacagtgcccagccagcttaaggatttcttttggaaaaagggctctgcaacattaaaataaggacctaaaagtgagggctgggaactagaattctagtcattatcagtgcccaccgataatcagaaacacttggaaaaacagctacttcaacctaactcttagaacaactgtgggtgctatgccacaaccttgtttcaggcagagccttctagaagagtctgtggcctcgtggaagaacagaggcctctgctgacctgtagaacttgttgacccggattttgatgtcagtctcattgggcctgccgttgctcttcttgggacagaagatctctttgatccggccaattcggtagggctcaggggcatccaggttgctgcctttgatgtagtcggagtatttccggtagtgctctgggtacaggtcctcatccacgggctccttccgtgggcgtttcacgggactggacagcttgatgctgcagagaagcacccacttgacatcaatgaaccttccaccttgcagtggtcagtcaggcatgactgaccagtgaaaataaccatttaaagtcaagcacctgatgaattaaggtaggtgtgtaccctaagaaatgatttaggctgggcattgtggctcacgcctgtaatcccagcactttgggagaccaaggcaggtggaccacaaggtcagaagttcgagaccaccctggccaacacggtaaaaccctgtctctactaaaaatacaaaaattagccgggtgtggtggtacatgcctataattccagctacttgggaggctgaggcaggagaattgcttgaacccaggaggcagaggttgcagtgagctgagattgtgccactgcactccagcctgtgtgacagagcaagactccatctcacagaaaaaaaaaaaaaagatttagctgcagatttagtctcacagtttgaagcacgcattcaccctctgcgcattactggctacggtggtggctgacactgctcaaataccccaggctcctgcctcccgactacttggcatcttgtgtttcctggcatgtgacgtgggcagaagtgaccaaagaggatgtcactgcctggggaatgtcctgtgtgctttcccttgggctcaaacactggcaacttctgactccagcggcccagatatccaagggacacaacaggtggagtcctctgctgacctgtgatgggcacctcgtatgagcgagacagcggctaccgtggtttttgttgagagagtttcactctgtcacccaggttagagtgcagtggcacaatctcggctcactgcaactcctcctcccaggttcaagcgattctcgtgcctcggcctcccaagtagctgggattacaggtgcccaccaccacacccagctaaccctggctaatttatttttagtagagacaggtatgtcggccaggctggtcttggtcttgaactcctgacaggcatgagccaccgcacccagtccagcttctgtggttttaagtcactgtgatttggggttgttgctatgatacaacctacgctaccctgactaaggctctgatctagaagcgacactggaggccaatgtaaggcgccacagggcctgggacaatgggagtgtggtctgactagtgtggaaaagctgttctttgaagaaggcctgccgttagggaagtcagctgtcacgttctccccactaggccccccaggagtctgacgggccccaaaggcgtctctgtgctgactctcccactttgccaggagcaactggcagaaaacactacggggaggtgtccccttcccaccaaggacaaccagagggggtaacgcgccccaactgtgccaaggctggagggaacctgcttctccagttctcataattcacagtaactgaactaaggcaagggagctggggctctaaggaaatggaattgtgagccgggaaggcatctggaaaacgttggctgtaattccaaccacacgctgattcttagaaaaaacacagaatggatcagtgtggaaacgatctgtggctttaggtttttcctggaagagcctcgatcctctgacacagagaagtcatctgatgtgattccctctaaccaagaagtaactcatgtccgttaaacctttactttaagccaggtactgtatggagcactttcaactcactcaacccttcgagccccagcaggcaagatcccactctcccacttcacagtaggggacggagaggaggtgtccttgggcagaggcagaacttgggggtgggcccccagctgtccctcgcgctttatccagtaagttctttttttttctttttttattttgagacggagtcacactctgttgcccaggatggagtgcagtggcatgatcttggctcactgcaacctctgcctcccaggttcaagtgattctcctgtctctgcctctcgagtagctgggactacaggcgcgcaccaccacacccggctaatttttgtatttttagtagagacgaggtttcaccatgttggccaggctggtctcagactcctgacctcagatgattccccactgcctcggcctcccaaagcgctgggattacaggcgtgagaaaccacacccagccaaaccagcgagttgacttttacgctcagctttgctctgcaatagcatcatggtcagtctacacgatttatgttgtctgtttgccacctatgccaacgtgacggctaggacaacagctggtgcggagggattggcaatgtctgtaaggagggggacaccacaaagccagcctggctcagcctggagcgccctggccccggctgctccgagggggcacttacttgaacgtgaaggcctcagggggcaggtacacaccatcaccaactcggtacaggatgccgttcttggtggctgagtagtagaggacccggctatccaggtcctcgagctgctccaggaccctggggatttctttttgcctcatctcagccagacgggcacagctcacacagaatctgaaggaaacaaagggacagaaacataaggccctgaggtggccggcagtggccgcagcagctactgccagcttaatccagagactctggtaaccaagaggaaaaaacatttgcagatgctagaaggaagaggtggctttcttgtgctttgtgttgacattttgaaggcacttatttgagaccaaagcccagagagaacatagcaagaaaatcaggcaacttttgagtcattgagacaaaaaccctaagatatcaatgaacagggtctagaatatggttaagaacacaccacgagcaacagtcccgagtggctcagtgaggaactcaatccagcagagactcctactgttctctccataaaggctcaacaggtatttgaggaaattcaacattattcttgactagtaagcccttaaaggagacttgaagatggccttaaaaatagagatcaaggcccagcatggtggctcatgtctgtaatcccagccctttgggaggccaaggcaggagggtcgcttgagcccagaagtttgagactagcctggccaacacagtgagaccccgtctctacaaaaaatttttaaaacattaaccaggcagggtggtgcatgcctgcagtcccagctactcaggaggctgaggcaggaagatcacttgagcccagcaggtcgaggctacagtgagctgtgaccacaccactgcattccagcctgggtgacagagggagaccctgtctcagataaataaataaataaataaataaataaataaaagaggttgggtgataaataaataagtaaatgaggttgggtgcagtagttcatgcctgtaatcccagcactttaggagcctgaagggagcagatgacccaaggtcaggagttccagaccagcctggccaacacggtgaagccctgtctctactaaaaatacaaaaattagccgggcatggtggcaggcgcctgtagtcccagctacttgggaagctgaggcaggagaatcacttgaacccaggaggtggaggttgcagtgagccgagatcgtgccactgcactccagcctgggtgacaagagtgaaactccatcacaaaaaagtaaaaaataaaatgaaaatagagatcaagccaaagctagcacgagacttatgggagaagcacagatgcccccggggagccctcttggcctcctgggtttccctggttgccacctgctcctctgggggtgctggctgctgcttttagttgaaacaagtgaggtacggaggttaaaaagaaggcatggggcattggacattaaaaaataaaagctcgccgggcgcggtggctcacacctgtaatcccagcactttgggaagccgaagcgggtagatcacctgaggtcgggagttcgagaccagcctgaccaacatggagaaaccccatctctactaaaaatacaaaaaaagtagccgggcatggtggcccatgcttgtaatcccagctactcaggaggctgaggcaggagaatcgcttgaacccaggaagtagaggttgcggtgggccaagattgagccactgcactccagcctgggcaacaaaagcgaaactctgtctcaaaaaaaaaaaaaaaaaaaaaattaaaaaaataataataaaataaaataaaaaataaaagcttccctcaaagcagtcacccagttacaaaagaatcgaggacaggtgtggtggctcacgcctgtaatcccagcactttgggaggccaaggcgggcagatcacaaggtcaggagatcgagaccatcctggctaacacagtgaaacctcgtctctactaaaaatacaaaaaactagccgggtgtggtggcaggcgcctgtagtcccagcaactcaggaggctgaggcaggagaatggcatgaacccaggaagctgagtttgcagtaagccaagatcgcaccactgcactccagcctgggcaacagagcgagactccgtctcaaaaaaaaaaaaagaaaaaaaaaaaggaaagaaaagaatcaaataagaggtctcatttacaggagaaaatatctaagaaacagccaaaaacatgcaagagctgggcacacactgaagaacacacgggaagtcttgaaatggcaagacgaaccctgttcctgggtagggaaccctcttacaaagacaacgccaggtcatccacacacttaaagcaactccaggccatctacacacttgagcatcattcatagtcaggctggcctttgacgagcaagagacacaaactggggggccgttggcggaagccaaccagacggaagcacacgggaaaagggagtgatgtgggctgaaagtgcctgctgaccccgagtccagccccagtgctcacttgaacttgttgtcctctgttggctgggtttttggaggggactcgaatctcgcgtagtcttgatcataccacagctggtagaagtaggtcttcccgtcgtccccctccagcagggactcgggatccatgcctcccttgggagataagaatgcgtgtcaggccaggcgcagtggctcatgcctgtattcccagcactatgggaggccgaggcgggtggatcacctaaggtcaggagttcgagaccagcctggccaacatggtgaaaccccgtctctactaaaaatacaaaaaattagctggacgtgatggtgggtgcctgtaatcccaactactcgggaggctgaggcaggagaatcacttgaacccaggaggtggaggttgcagtgagctgagatcatgccattgcactccagcctgggcaacaagagcgaaactcagtctcaaaacaaaaaaaaaaacaaaaaaaaaaccaaattaaaaaaaaatacaaatcaaaacaaaacagaacgcacgtcagcagtgaccctccacgataaggcaggggctcacgagggacaccaggcactcacctccatggcccagttttcggagggggctttgtagatgactttcactttgctgtggatatatgaaagctgcatgtcctcacattcatccaccaagaacagctccagagggtccgacgtggccccgaggactgtgtctgtcccagcgcagaaccagtgggcgtgaaacatctgcccgttgctgctgtcctcccacagcgccgtgaccctggaatcagaagacgggcatggggagaaagttctgacttggccagcagatatgtgaccaagtctatgcaggagcactcgtccttttcagttttcatctagggcaaaaagctgctggtgctattttggcaaaacaggcatctcctacttgatgagaaagtgcatgcagaagtcaagcaaaaagaaagatgcaaaccttgctagatacagcggttttgaggaatcatctggaataacagagacacagtcccccacttccagggtttccgcatcaatgcacaccttcttatagtaactcttcttcccatcagtctgaaaatgagagcataagttcatggaggatcattctgagggtctttgctggccttgacttgcatggtcctctgttacttaaagtaagacatgactcgatttcattaagaagtcaatgaagagttgctgctaaagagaacatcctgttctacaagggcttcaataataagaaaaaagaagaacatccaccttccttggccagatgctgtggccaagggcatccatgtccctcccacttctgctctgccactcgggtcccaggatttgattttaacagcacagcccacaatacctcaccatggtctgtaaggccacagcctgaaccctgacccctgtcctgcccatcatcccctggctcaagccactccagctgcaggggcctccttccttttctccaacaaagtaagctgactgccacctcagtgcagctctcccccaggtcgtgtggctaggtcctacctgaccttctccatctcagcccaggtgtcacctctgcaaggcctcgtggccccagcctcctcccagccccctaccctgcagaggcactcatgccatgcagcagtacccatgtctgtcctcctgcaggggctcagccacggcccaggcagccagcaggtggcaagcctcataattaagtgaactgattgcatctttaatttatggacgtcagagaagcaacacagaggatactcactcctctctctcacactgtggtaaaggaactgaccttcagtgaagccaatgaccacagaacggatgggaggccatctgttggtgccccaaaaagacccaccccacaccagagggggctgtgacagctctcttggaaacaagctatgaggggccaggcacagtggctcctgcctgtaatcccagcactttgggaggctgaggtgggtggatcacttgaggccggagttcgagaatggcctgggcaacatgatgaaaccccgtctctactaaaaatacaaaaaaagttagcctggcatggtggtgcacgcctgtaatctcagctattcaggagggtggggcaggagaatcgcttgaacctgggaggcagaggttgcagcgagctgagatcgtgccactgcactccagcctgggtgacagagcaagattccatcttaaacaaaacaaaacagaaaaacaagctatgagggctcacctgcctgatgcccctagaactgtgtcaaatgcccattttgggacattaggagaactgagccttgtggccacacaaaaatgccttgctggtactgagccatggaacatggtctcttggccagtcccgctcttctcaggggcaaacagacaggtttcttagtgccggggctcaggctgcctgagaggtcaggttggcgagatactagagggcaacctgcttattgggaacatggcagtgagctgaccaaggggctccaagggttaccttgacggcttctccgacccaagagatgcgattcttgttctgtttcttcttcttcccctggtgcatttttttgggtgacggcatctctgggatgttatcatcgacttcctcatcgtcatctgcctccttcatggccatattgggacacctgcaatgtcactggttatacctaaggccccttttctaagtaagaccaaccggggctgttttcttcataacagggacaggtcctgagacaatgcctaacgaaggaatcctggtgctgtcccacacatgcaggcccttctccacagtgcatctgccaccagctggcaagtcctctgccacaggaggaagactcggcctgacctacctccgctcttggcaagcctgcttgctccgtccactgccaccaaatttaaccatgtccttgcaggctttacatttcccacactcaggctgctgacacacctaaaaaatggcattaaaaaggcaaatcagggctgggcacagtggttcatgcctgtaatcccagtatttcagaaggccgaggcaggcagatcacttaaggtcaggaattgcagaccagcctggccaacgtggtgaaaccccatctctactaaaaatacaaagattagccaggcatggtagggtgtgcctgtaatcccagctacttgggaggctgaggcaggagaattgcctgaacctgggaggtggagattacagttagccaagatcacaccaccatattccagcctggacgacaagagtaaaactccatctcaaaaaaaaaaaaaaaaaaaaaaaaaaaaaggaaaaaaaaagggcaaatcacacagcccttactaacaatgagacaaatgatgcattaagacttttaggtctcaaaaaattaaaaaaaaaaaaaaaaagtgagtcacacagcccttagcaacaatgaaacaaacggtgaattaagacttttaggctgggcatggtggctcatacctgaaccagtacattgggaggctgaagcagaggtagatggatcacttgagtccaagagttcaagaccagcctgggcaacatattaagacccccaactctacaaaaaattaaaattagccaggcgtgtgacaaattcctgcagtcccggcaactcaggatgctaaggcgggaggactgcttgagttcaggcattcaagaccagcctaggcaacatggcaaaatcccatctacaaaatgtttttttttaattagctgggcatggtggcgtgcacctgtggtcccagctacttgggaggctaaggtgggaagatcacttgagcccagtaggttgagaatgcagtgagctacaatcatgccactgcattccagactgggtgacagaacgagacccatctcaacaacaacaacaacaacaacaacaacaaaaccaagacttttaaaaatgtgcctatttggctgggtgcagtgcctcatgcctctaatcccggcagtttgggaggccaagacaggaggaccacttgaagccaggagtttgagaccaggcaaggcaacacagcaggaccctgtctctacaaaaaaaaaaaaaaaaagcaatattcaacctcattagaaatatggtaagtgagagaaataaaattcccttcccattctccagatgggttaagaagccagataggtggtgtgaggaaagaagaacgcacactgctcaaatggtaagttggtagaaccattttggagagcaatcttctagatcaaagttaagaatacacacccacaacccagcaacgctacttctaagcagatacactcgcgagaagctttgctcaaggatgctgccacatatttacaatactgaagaggtgcctatcattgaggagtaagttaggatattcatttaacaaaatactacagaatatttaaaatgaaataactagatctaccagtatcaacacgtaacagttacacaaataaaaacaaatgattttagggctgggcacagtggctcacacctgtaatcccagcactttgggaggccgaggtaggtagatcacttaaggtcaggagtttaagaccagcctggccaacatggtgaaaccccatctctactaaaaatacaaaaaaaattagccgggtatggtggcgggtgcctataatcccagccactcgggaggctgaggtgggagaactgattgaacccgggaggcggaggttacggtgagctgagatggtgccactgcactctagcctgggtgacagagagagactgtctcaaaaaaattaaaaaaaaaaaaaaaagattttagaagttataaaacattggacacacgtgtgttaaccaagaaaaataaaataaaaccaaaataacaatggtgaggacatgcaggctcctgttaagagatgccagcggggatcaaaagcaaagccctgaagccagtctttatccaaaagaaagtcaggtaataggtatcaaaatagtcctggtctttgggtcataggactaggaagttagttcctcctgagtgaagtaaacatatattttaaaaactcacagaaagggacgcctcctgagggcctcaaatctaagctggacaaagtgcccacttagatgtgaatacccctttagcagtccaacaggggccttcagactgtgagatgcaggcacagcagagccacccagaagccaggctcttcaattaaggacagtggcattatcagcaaagcacccaagcatgcctctgtggacatctgtcctattgacgttcaatgaagtatgcagggtcctcccagaccactaactaatttctgtctcaggggtcacatttgagcagccagagtctcaagccacagagagaaagatggagcagtcctcagatcaggccagaggctgggccaccttaggggagcgggagcacccacaggtgaggttacctcacagacgccacatcgccggcgcttaaaggcgttctccttgtcttctctgtcatccttttcaatttgctctgcgaagaaagtatcgaagatctggtagaccagcttggtggtggtggctttcgtgggtcccctgtccttctccctggtagaatgcctgatggtctgccgcctcgcctgggctcgcctacgggagaggttccagcatctcagaggactgggacagaggatgtgggccatgctctaccctccccggtctccagtcttcactctggtccctgccgcatccttacctctgtcccagcgtgaccccagccagcttgatcaggtcccgcatgcagggtgtcaggaagatgggctgctcatcactgtccccggcctcgtcataactctccacctgctccaccacaaactgcgcgtgtcgcaggagggagtcctctgtgaagcggttcaagttgaggccagaaggaggaaccgtggtcttgaaagagaacaggtttctctcatgcttaagccaaactggcctaaatccaactgaagaacagtgtctgctggttctgaaggcaagtttccagtgggaatcccggatgctgaggaccctcgatctcttacctcgatcttgttgatcaggtcctcataggtcgagtcggaattgctctgcaggaactccaccacaatcttgctgatgtagatcttctcctgcatcagcccaaatatgggcgcatactcgggactgggatccatcagaatgtattcggcaaatgctggggtgaacagaggaggtgtggaaaaggggctggaatctgatggcgcctacagtggccacagggcatggaggagtctaccaaactcacccaacagtctaaaagtcatcccgtacccaaatgtcagaaacatagggcacaacacatcatagctggcttgttctgaagaagcctgtctgagccagccagagagcgaagactagctgagtaggccttcattgagctcatctctggtgtttggaattcagtctgggtttgggttgcaagaataagacctgctcttttttttttttcaggggaggacagagtcttgctccgtcacccaggctggagggcagtggcgtgatctcggctcactgcaacctctgtctgctgggttcacgtgattctcctgccatagcctcccaagtagctgggattacaggtatgcaccaccatgcgtggctaatttttgtatttttggtagagagggggtttcaccatgttggccaggctaggctggtctcgaattcctggcctcaaatgatccccccaactcggcctcccaaagtgctgggattacaggtgtgagccaccatatccggccaagacctgctcttacaactggagagtcagttccagagccagtcataactaacacaagaggctaccccaactgaacctgctaaggttcccagtcacatggccttctgcaagcctgctgagaattcccaccagagccccgtcagcccccaggaaggagaacatgaaggcccctttcagaccccggccagcctatgatgggccacacacttacaggtgctgaagccgatgagggccttttcacctccatcaaagccagtgatccaccattcatttatggggccaagatttttgccattaacaccacctagagcagaaaaaggaaatggactaaaggctctgactcacatcccaaacccaggaggcgctctaagcgcccactcagcagacatcccatcagccaggtcgggtgctcctcagtcatcacaatgacttggcctacagctgctcctggcacaaagtctcacaccctaactttaagaggcagcagcaactccagctgactattgcttcataagtatgttttttatttatacatatatataagtatatatgtatactatatatatatgctatatatttttttttaatagaggcaggctcttgctatgttgtccaggctcgtctcaaactcccgggctcaagtgatcctctggcctcagacccccaaagtgctaggattacagatgtgagccaccctgcctggctgtttttaaagtgtgccccaaacataatcccggactattccttaccttcaagagatgggtcatcatcatagattggttttgctgaaccagaaaagaagagttcgatattcttctcgatgaggccggtgtcgatgggacacaggtgaccgtgcttacagtacacactagacaggaaacaaagcacatgcttaccagctaagccgtgaaggcgggtcttcgtgcagacttcagatcaggcacgaggcaatgagagaatgtacaagtctgacactctttttttgtttgtttttgagacagagtcttgctctatccctcaggctggagcgcgatggcataatcttggctcactgcagcctccacctcccgggttcaagtaattctcctgcctcagcctcccgagtagctgggattacaggcctgaaccaccatgcccggctaattgttgtatttttagtagggacggggtttcactatgtgtagcaggctggtctcaaactctttatctccagtgatctacccacctcagcctcccaaagtgctgggattacaggctgaaccaccatgcctggccccgacactcattttttggttgcgggaacactggattaagacagcgttctatcacccagagtttctaccttattctcccacctaagcatcaagtgtatgtgtgtctgcaacagcaacaccaaaagatcagtcagacttacagtgcgggaaataccggtttctagaacaccttctactatgcagtgcagccactagctctattcagctgcagaacatttctgtcactcaaatgttaataaagcctcattcccatcaagtagcagtcactctccagtctcctcccaaccggccctcagcccccagcccccggcaaccaccaatctgctttctatacctatgaattcacctattcaagatacctcatatggttaattttatattatacgagttagacctcaatttagaaaataaagcaggttatagaacagtgtgaaaagggatgtgggaaggaaggacttctgcctccttttgggcataaatctcaaacacctgcggccccactgtccagatgccccttgacattcgggagcacgttctttagtgaagacagagaggcaagatgtcaaactcaaggaaaaagacatgaactgggtgttctgcttacaaacctgctcatctagacaaggaccaccctttcccggccaaagatgctgggctatcctcagagcccccatatgaagtctgcacaggtctctggagagcaccctccaccacactcacccagcttagtgccttggaagccagaaaggctcaaacaaaacactgcatacctcctgcggagctcccctactgcgtaccaggcatggcagacagaataggttgcagccctgcctcaggatgtaaggcccagaagaagagacagagagatgaagccagcgtggatcaagggagggcctacagaagagggggtcccgctccccgctgcacaggtgggctggaggctctctccataggggagacatgggagagaagctctaagccccaggcaggggcaggacccactggttggtaggccagaccccacccatgactggcttctatcgccagtttcaagccaagtacagcagtatggagagcccctaaataactcaggcagtccagctccagtggacagaaggcatgtgacttctggaaagtgtcctccaggccaccatccaccctccaggaacgaatctatgatagatctcaacttagggaggaagctgagacactcaggactctggcagccccagccccaggctcccccaagcctttgtccctggtgaaggccagagtgaggccctcgggcatggttgccagctctgcccaccacagcacacctcactcacaccagcaggcagaggtgtgtggccctgctttgggccaggcctcggggggctagcggttgctggtggacgcaacagcatcttgatctagatagaaggatcccatagaaggagagggaggggaacaaccatcagccaagcacggggaacgtgtgggtgccctcccagtgggtacaggaaccgctgcctgggggtgcttccaacaggggtccccaaggcacttccccctcctcttcacagagagggaaaataccacccaggcctaaaaggaggcagggccgttcctggagctgaggcatttcccacgaagaacaaggtgaagccctggagggtaactgcacccgcagggagagggagcaaaatggggctggggatgcctgagagcacagggcctctgcccactcaagagctgacgtgagcctcggtgaaggtacgggccggacgccaggcaccttccctcagaggacaggagagtcagtgctgaggcctgcaaggccctgtgtggcccagccccaacccagcaaccaccacaccagactcaccattcaccttccacagctggcacaggcccctccgagccctggtaatggtgtccccttctacctagggtgccccaccccggccatcccctcggcctcttctctcacaggccatcaaggtctttactgaaaatcattacctctcccgtcttcacagaacttcctcctcccacttattctctctgcatgtcaccaggcttttaaaatctgtcgtggctgtcactacccgacaggtatcacccatttctggctccgtgaaggcaggacctgagcagctacatccacgacacctagatcactggtacctagcacagagtaggccttcatctgagcgtgtgaccctcaggatgtgggcagaatggaggggtaatatgtgtagtgtaaaaacccaaaaaccaaaccaaaaatcagcaaagctctattgtcccttcatcagctttccacgtggctctttgagacggagtcttgctctgtcgcccaggctggaatgcagtggcaccacctcggctcactgcagcctccgcctccagagttcaagaaattctcctgcctaagcctctcgagtagttgggattacagtcgcgtaccaccacacctggctactttttgtattttcggtaggtttcgccatgttggccaggctggtctcgaactcctgacctgaagtgatctgctcacctcggcctcccaaagtgctaggattacaggcatgagccaccgcgcccagccctccacggtggctcttatccacgaagtgttagcttaagacatgttgcaggtcaggcactaaaaaacatcaccagaatcgtgagcccgcaggcacctctggggatgtgcctccttccacgaagcaaacatgcacacgaaagtgcacttacctgaagcaggtcagtttgtgctggggaagcgcctcataactctcaaagccagactcgttggcatcaaagatggacagcttctcatttgtcagcatctgtggctcatccacctgaaggacacggggctggtgagcagtgggacaagggacaggcagaggaaggctgggaagagagctgtacgtaccgcgtctggtgggtgctgcccatatttgaggtcagggtcgtccaggtactgcccgcactgaatgcacttgggagggtgggtctgtgggagcaggaacacagatgatggcactcagagagcagctcccagccgcctcgtgagcgccgccaccggctttattcccggcagatgtttaccttggagttcatgactgttttggcgcgagccatttttttctccgttctgggggaaaaaaaaaaatcacaagatcgtttgtttaattgtttcagaaaatatcaaaatcgcccctgtgaggtttctgcctgaggtgcctgtggcacagggaggcaccggctgtggcagtgaggcccaggcgcgtggtcacagtggctcttcaccgcaggggcatcctgcctgacgcaccttggtcctatgttcaccaacccgatccaaaatgagcctaaggttgctctggcaattactgaaaccccttcccttttgttctagaaccatcattttaacattaccatctgctttcgataatgtcaagaataaattcttacggttctttgggggtcgttttgcgtctcttctcctcctacacagggaaaacaaaagaggattaaaggctaagagagtgttttacacccagatagtgcttcggtgttaagaactttgtataagtgattatcataaaacagagagaaggggagggaggcagtgagagggccagcaggtgagctctgactcactctaccatctaaagtcatagaatacaaaatcttatagtcaggcccagcacagtggctcatgcctgtaatcccagcactttgggaggccaaggcacacagatgactggaggtcaggagttccagaccagcctggccaacatggcgaaatcacgtctctaccaaaaatacaaagattagccaggcgggcacttgtaatctcagatactcagaaggctgaggcagaagaattgcttgaacccgagacgtagaggttgcagtaagcagagatcatgccactgcattccagcctgggcgacagagtgagtgagactccatctcaaaataaatgaataaataaatctcataaccaaagacttcctgaaaagatttagaggaaaagccaattttttaaaaccttagctttcctgtgtaagtggacacctcaaggtaaacaaataattggccaggcacagggccgggcgcgatggctcacgcctgtaatcccagcactttgggagaccgaggcggatggatcacgagatcaagagattgagaccatcctcgccaagatggtgaaaccctgtctctactaaaaatacaaaaattagttgggcgcggtggcgcatgcctgtagtcccagctactcaggaggctgaggcaggagaatagcttgaaccagggagacagaggttgcagtgagccgatgtcgcaccactgtactccagcctggcggcagagcgagactctgtctcaaaaaacaaatacataagtaaataaataaataaataaataaataaataaataaataaataactggccaggcacagtggcccatgcctgtaattccagcacttgaagaagcccaggtgggaggactgcttgagcacaggagctcaagaccagcctgggcaacacagtaaaaccctgtctctacaaaaatagaaagttaactgggtgtagtgccatctgcctgtagtcccagctaccttgaaggcccaggtgggaggattgcttcagcccaggagtttgcggctatggtagctatgactgtaccactgcactccagcctcgacaagagtgagaccctgtctcaaaaataaatactaaaatgtaaaggtaagcaaacaattgatgagggggtatacagaccgagtcatgtcccctgcaaaattcatatgttaagactaacctgctatgtgactgtatttggatgtagagtctttaagagacaattatggttaaatgaggtaataaaggtggggccccatccaataagaccaatgtccttgtattttttgttgttggttttgagacagagtcttgctgtgtccccagcctggagtgcaatggtgtgatctcggctcactgcaacctctacctcctgggttcaagtgactctcctgcctcagcttcccaagcagctgggattacaggcccctatcaccacaactggctaatttttgtatttttagtagagacagggtttcaccatgttgtccaggctggtttcaaactcctgacctcaggtgatgcgcctgccttggcctcccaaagtgctgaaaagacaggcgtgagccgctgtgcccagcatttttttttttttttgagacagagtcttgctctgttgtccaggcaggagtacagtggcacgatctcagctcacagcaatctccgcctcctgggttcaagcaattctcatgcctcaggcttccaagcagctgggactacaggcatatgccaccacgcccagctaattttgctgtgtccccagcctggagtgcgatctcggctcactgcaacctccacctcccaggctcaagcgattctcctatctcagcctctcgagtagctgggactacgggcgtgcaccaccatgcccagataatttttgtatttttagtagagacagggtttcaccatattggtcaggctggtcttgaactcctgacctcatgtgattcacccgcttcagcctctcaaagtgctgggattacaggcgtgcgccaccacgcccagtcttctttttcctaagaccagcctgggcaacatggcgaaaccccgtcttggggaaaaaaaaaaaaaaaaaaaagaaagaaagaaaagtgagacctttaccttttcatcctcgtctttttcatcagaaatctgtggatttactttttcaggttctttttcttcgggcctccgtttggcagctctgcagggtgaacagatacacagcaagtagcagcttagaaacactaaccacatcgccaactcgcacggaaagtgacaaactaatgcctccccatgggaaagcaagatacccatgggagctctataggcacactgccagcttgtcatcccgagacgaggccttcagaggccccagggtccccacacatctacatcaccacaggtttctagaacaggcttttttttttttttttttttgagacagagtttcactcttgtccaggctggagtgcagtggcgcaatcttggctcactgcaacctccacctcctggcttctagcagttctgcctcagccttccgagtagctgggattataggcacccgccaccacacccagctaatttttgtatttttagtacagacagggttccaccatgttggccaggctaggctggtctcgaactcctgacctcaggtgattcacccacctcagcctcccaaagtgctgggattacaggtgcaagccaccacacctggcctagaacaggctttctactgatccagatgacacaaaagcacaagcattttaaacacttacagatctttgggttgacttctgtgcttcttctcatcctgacagaaaaataagggggaggtagagagataaagaagggaaaaaattagtttctgagccagagtgagataaaatgcaaacactgaagttacaggttagggatcccagcactgtggagctggaagacaggcaggcctgggcagatctaccgggtagacacgaggcttcactttccctcacttaattccccacctgaaactaacaagagggcactaaagaacctcctagaccagggcttggcaaactgtttttgtaagagccagaggatcagtattttcagctttgctgaccacgtggtctgtgtcaggatgatcatctctgctatggtagcacaaaagcacccacaggcaaaatgtaaatgagaaagtgtggctctgttccaataaaactttatttacaggctgtgtgcagtggcatgtgcctgtaaacccagcactttgggaagctaaggcaggaggattgcttgatgccaggagttcgaggccagcctgggcaacatgctgagaccccatctctgcaaaatatactatatatatatatgacacaggctggtcagctcggggggccctgcaccggggccaacagctcctaagggctgacacaagctcctccccaggttcagaggacaggctgcctctcctgtcttcactgcaggaagcccagagggcatttactactccaggactcaaggtcttcaggaacaccatcaataccccatctgaatgttggtcagagatgccagtggtttaatacaaaaagcagcatatatatatggttaatatatacatatatatggagagagagagagagattgattcactcttgttgcccaggctggagtgcaatggtatgatcttggctcacctctgcctctcaggttcaaacgattctcctgcctcggcctctctagtagctgggattacaggcattcgccaccacacccagctaattctgtatttttagtagagctggggtttcaccatgttggtcaggctgatttcaaactcctgacttcaggtgatccgcccacctcagtgtcccaaaatgctgggattataggcgtgagacaccgcgcctggcttacaaaaaataagtttaaaaagtagacatccatggtggtgcatgcctgtagtgccagctacttgggaggctgaggtgggaggatcacttgaacccaggagactgcagtgagctatgatagcaccactgcactcctgcactctagcctgggaaacagagcaagatcctgtctcaaaaacaaacaaacaaacaaacaaacaaacacgccgggcgtggtgcctcacacacataatcccagcaccttgggaggctgaggcaggtggattgtttgagatcaggagttagagaccagcctggccaacatggtgaatccctgtctctactaaaaatataaaaattagctaggcatagtagcacacgcctgtaatcccagctactcaggaggctgagacaggagaatcacttgaacctgggaggtggaggttgcagtgactcgagatcacaccattgcatgacagagagagactatcttaaaaaaaaaaaaaaaaaaaaaaaaaaaaaaaaaaaaaaaaaaaagaacaaaccaaacagactgaatgcaacggttcatgcctgtaatcctaccactccgccactttgggggactgagataggtggataactcgagtctaggagtttgactgagaccagcctgggcaacatggcaaaaccctatctctacaaaaaattaaaaaaaaaaattagctggacatggtggtgcctgcctatagtcccagctacttgggaggctgaggcgggaagatcacctgagcctgggaggtcgaggctacagtgaaccgtgattgcaccactgcattccagcctgggtgacaaagcaagaccctgtctcttgggatgggggacagtggctcttagagctttgggaggcagagatggcacctcctgtgcaaggggccccctggggtggaacagccaacaatccttgttctctgggcactgcttttattattattaccatattatttttttgagacagagtctcgctctgttgcccaggctggagtgcagcggcataatcttggctcactgcaacctctgcctcctgggttcaagtgattctcctacctcagcctcccaagtagctgggattagaggcacatgccaccatgcccggctaatttttatatttttaggtgacaccggatttcaccatgttggcctggctggtctcagactcctgacctcaagtgatccacccacctcagcctcccaaagtgctgggattacagtagtgagccaccatgcccagccctcacatccctttctaccatgaggcaaaagtgctggcagtgtgagctcaggcccctgccagtttccaatagagggcagggagtaatgtgactactccagtctgaaggagtgctgacagtaaggtgaccaacatttggacagaagaggtgagggatgggaggctggaggcaataccaaaggctcccctgctatggggtggggatggaagcccactggcgaccgggtcagaagtgagggtgcttgtcacccagcaagcccgtgaccttgggctccactctctagattgtaacaggcagaaacccagagaccctcttggggtcttcggcatctcttagatagggacccgccgccccccaccgatgacctagctcccttccctagagttcatgcaggagggcctgcaggcaacctggccatcctgtactttgacagaggcccagcagtgttccacatgatgctttagggtttaaacgcatgcacttggctaaactagactggggaggctggcagggggagagctagactcagaacgtaggaggctgggaaagaatcaaaggtgtggctgacatgtgcgtcagagctgactgtgtgtcaaggcttctcagcagtgaggcctcaggagaggatgcttcatgcacatctcagcccaggctcacacagaccctctctagtgtgaaagacagaggacaactgagtgttcactaggcatccagcacaggcatccagccacaaatcccggcccccaaaaggaggaaaaggtgaccttcccagagtctggatggccccatggagcctgggtggatggggctggacttgaacccagagccccaccctgcgcactcccgcccaagcaaacaggagcagaagaatgagggggagttcagaaacaaataacccgcctttactttctcgtctccatcttcgtcctcgtcagcctgcacgcctgccctggcttctctgtccggctcctccttcagtttctgtttgggtgttctgtcacagaagacaacacacacacaggctggtcagctcggggggggccctgcaccggggccaacagctcctaagggctgacacaagctcctccccaggttcagaggacaggctgcctctcctgtcttcactgcaggaagcccagagggcatttactactccaggactcaaggtcttcaggaacaccatcaataccccatctgaatgttggtcagagatgccagtggtttaatacaaaaagcagacaaagggatgtcatgatttccgtggcctgatgggaatccagcctgcggtggaggaagacccatgtctggcctgcctaggttgagagctgggctgatgtgcgatcagcgtcagtcagtgaccgtggacagctgactgcacacaggggtccgagtcttcacctcccactctgccagggccctgccgctcaggtggggtattctgcccacctctggattcaggctcagtctcaaaatttgcttcagctaattgttttctttttcttttttcctttttttttttcttgaggcagagtctcgctctatcacctaccctggagtgcagtgatgtgatctcagctcactgcaaccaccgcctcccgggttcaagtgattctcctgcctcagtctcccaagtagctgggaccacaggcatgcaccaccacacccagctaattttttgtatttttattagagacggggtttcaccatgttggccaggctgatcttgaactcctgacctcaagtgatccacccgcctcagcctctcaaagtgctgagattataggcgcgagctactgcacctggcccaacttttttcaacagaggtttgaaaaagtgctacttttcatttctgcccttgtggtctggcacagccacaagcgtgtacccagcctggccaaattgcggaggcagagctgggtcagcccagccatccccactaagccacctcaagatcagccgacagccaccaagctgtagacaagtgagcttgaaaaatgctcactgttctaggcctctggccttggagccatttgtcacacagcattttcacagtgaaaggtaagtgacacagctgctcacctgatggcctttcactaccacatgacacacagctgtgtgaccaaccctgagaagggccctggggttgggaggagaaatcgaagctaacttcaccccgtaatcccagcactttgggaggcgaggcaggtgggtcacggaggtcaggagttcaagaccagcctgaccaatatggtgaaaccctgtctctactaaaaatacgaaaattagttgggcatggtggtacaggcccatactcccagctactcgggaggctgagacaggagaattgcttgagcccgggaggtgggggttgcagtgagccaggattgcaccactgtactccagcctgggtgacacagcaagactccgtctcaaaattaaattaaattaaattaaagttaaaaaagttaacttcagccttcacttcagggtggtctcacctttcacaagcagaacttgcccacataagagacatatgattagtgcccactgttccacaccaacccgttattttaccaagatacttatgttagcaattcagtttcacaacaaagcacaaaggcaggttcgctgcacttacggttctttggtttgacttcggagtctcttttcttcctaagttgcagggaaaaaagacaagttaattttttccatttggtttggatctttctattaaagtgtcctatggaaataaaacacctgaactgattctagagtccactggtgggagtaaagactgtctaccagtgggcacagtagctcatgcctgtaatctcagaactttggaaggctgaggtgagaggatcacttgtgccaggtgttcaagacagcaattttcttttcttcttcagtggggtaagtagacaggaaatgaaactcttagaaaggagatactacaacactgcagtttcagtatttttacttcaaaattcctctactacttgtcatcagttaagtgttgatagcctcacagaaagtaactttattataaatctctacttccgatattaaaggaatgaaataggatggcccaatctgaaaagtagctccaactgagacacaacaacacatcctctgagactgcatttattcatttatttatttatgagacggagtctcactctgttacccaggctggagtgcagtggtgtactcttggctcactgtaacctccaactcccaggttcaaacaattctcctgcttcagcctcccaagtagctgagtttacaggcacacaccaccatgaccagctaatttttgtatttttagtagagacagggtttcatcacgttggccagactggtcttgaattcaagtgatccgtctgccttggtctcccaaagtgctggcattacaggcgtgagccaccatgcccagcctgaggctgcatttaaagaaccagacacatcttgccagagaatcaggcaagtcaaatccaaccctcagaaactccacatgtggtagtctgtgaagagatcgcaaaggtcaggaatattaagaaacactttgcagctgggcacagtggctcactactgtaatcccagcactttgggaggccgagatgggcagatcacgaggtcaggagatcgagaccatcctggctaacacagtgaaaccccgtctctactaaaaatacaaaaaaaaaaaaaaaaaaaaattagccgggcgtgttggcgggcgcctgcagtcccagctactggggaggtggaggcaggagaatggcgtgaacttgggaggcagagcttgcagtgaaccgagatcgtgccactgcactccagcctgggcgacaagagcgagattccgtctcaaaaaataaataagtaaataaataaataaccccgtctctactaaaaatacaaaaaaaaattagcctggcgtggtagcaggtgcctgtagtcccagttactcgggaggctgaggcaggagaatggcgtgaacctgggaagcggagcttgaagtgagcggagatcgcaccactgcactccagcctgggcgacagagtgagactccgtctcaaataaaaataaaaaaaacgcttagcaaatcttcctactacaagaagaaatcctgagagtatgcttacaggtgagggatttcgatcttgccccaggttccttctttggaaggtggtggttgaactagcccgttaggactgcttgttctgaaacaaattcgaggtatgcactgactgcaactgctgtctaatttaactaggatcagggtaggaaaggtgatcaatgaaagaccagcctcggccgggcgtggtgtttcacccctgtaatcctggactttgggaggctgaggtgggtggatcacctgaggtcaggagttccagaccaacctggccaacacggcaaaaccctgtctctactaaaaatacaaaaattaggcggacggggtggcgggcgcctataatcccagctactggagaggctgaggcaggagaatcgctggaacccagggggtggaggttgtagtgagctaaaattgcgccacttcactccagcctgagcgaaagagcaaaattccatctcaattaaaaaaaaagaaaaaaagcaagaaagaccaacctcaagtactgaatggttcaaaaattattgtacagcggccggatgcagtggctcacgcctgtaatcccagcactttgggaggccgaggcgggtggatcacctggggtcaggagttcgagaccagcctagccaacatggtgaacccctgtctctactaaaagtacaaaaagttaattagctgggcgtggtagcggaagcctgtaatcccagctactcgggaggctaaggcaggagaatttgtttgaacgcaggagacagaggttgcagtgagccgagatcacaccactgcactgcagcctgggcaagtagaacaaaactccgtctcaaaaaacaaaaaaaattactgtacattttagttgattccccaatggacagccatcctttactaagctcccaagtaaggcactcgtcacctacctaagttggtaagaaacttctagtcatcttggtttttttttgtttgtttgttttgtttgtttgtttgtttgttttaagaccagtctcactttatcatccaggctggattgcagtgggacaatcatggctcactgtatcctcagcctcctgagctcaagtgatcttcctgcctcagcctcctgagaagctggaactacaggcacactgcctgttgtaagctccaccacatccagctgatttttgtattttttgcagagacggggtctcactacattgcccaggctggccctgaactcctgagctcaagcgatccacccacctcggcctcccaaaatgctagaattacaggcatgagccaccacacccggccctcagtcatcttattaaaaaacaaaacaaacagaaaaaaaaacaggacccagcatctgtattgcatagaaccttagactcagattttacaaagaagatgagggactggggaaagagctggtctgacttcagagaggagaatacaactttatgtctggatgatgctaaagaattttagcacctcctacatctgaaaattagatcttcaccaagatctcgtcagccagagaaggtggctgaggtgacagactgaaactgactagttgatttaagtagcataggttggccggtgtggtggctcgtgcctgtaatcccagcactttgatggctgaggcaggtggaccgttcgaggtcagcagtttgagaccagcctggccaacatggtgaaaccccgtctctactaaaaacacaaaaattggctaggcgcggtggttcacgcctgtaatcccagcactttgggaggccgagatgggaggatcacgaggtcaggagatcaagaccatcctggctaacgtggtgaaaccccttctctactaaaaatacaaaaaattagccgggcatggtggcaggcgcctgtggtcccagctactcgggaggctgaggcaggagaatggtgtgaacccaggaggtggagcttgcagtgagcggagatcaagccactgcacttcagcctgggcgacagagcgagactccgtctcaaataaataaataaataaataaataaataaataaataaataaaaacacaaaaattagccaggtgtggtggcaggcgcctgtagccccagctagttgggaggctgggacatgagaattacttgaacctgggaggcggaggttgcaatgagccaagatcgcacctctgcactccagcctgggtgatagagcgggagactgtctcaaaaaaaaaaaattaaattaaattaaataaataccacaaataagtagcaaagatcctcgctatgacaacctcataacccaccttccatgtagagaactacaaaaaaataagtttgaaaagtattttaggccgggtgtggtggctcacgcctataatcccagcactttgggaggccaaggcaggtggatcacctgagattgggagttcaagaccagcctgatcaacatggagaaaccccatctttactaaaaatacaaaattatctggctgtggtggcaggcacctgtaatcccagctactcaggaggctgaggcacaagaacccgggaggcagaggttgcggtgagacaagatcacaccactgcattccagcctgggcaacagagcaagactccatctcaaaaaaaaaaaaaaaaaaagttttagcacctcgtacgtctgaaaattagatcttcacaaagatctcatcagccagagaagcaagaaggcgaggtgacaaactgaagctctgtgactagttgattaagtggcataggttggccggtgtggtggctcatgcctgtaatcctagcactttggtggctgaggcaggtggatcactcgaggtcaggagttcaagatcagcctggccaacacagtgaaaccccatctccactaaaattagccgagtatggcggcgggcgcctgtagtcccagtgactcaagaggctgggacatgagaatcacttgaacctgggaggcagaggttgcaacgagccgagatcgcacctctgtactcattccagcctgggtgacagagtgggagactgtctcaaaaataaataaataaataaaataaaataaaatatcacaaataagtagcaagggtcctcactatcacaatctcataacccacctttcatgtagagaccacgagaaaacaagtttgaaaggtgtttagccaaagtcaaaggcatttcgatcactagcaaaacccatcttgttcttccacgttccccaccccctgtccccacgtcctggaaggaaattgggaccatataggattaagggagaattaacaaacttagaggtgatagagctttactttttcatctctttcttcttccttttcagtgcgcgttcctgattttgctctttcaggttcttctgcaggaagcggtctagcaactctgtcaagcaaaataacacagaccccaagtgtgagtgccaggagcttccccaaagaagcagttttcataaagctcctctttcccccaaaagcaatcttcattatctcaggagccctgacagacacatactcatttaacatttagtatttgatatgacttttacacctggttcgaatgccagctgccctcgattcattccttccaagaaaacaggagaattctacttgaatctaaacgctaatgatctgaccccaaattcagatacttcataacgatatggttgccatggaaacacacgataaagttcttctttttaaacttttttttttttttttgagatggagtcttgctctgtcactcaggctggagtgcagtggaatgatctcagatcactgcagcctctacctcctgggttcaagcaatccttctgactcagcctcctgagtagctgggattaaaggcacattccaccacgcccagctaagttttgaatttttagtagagacggggtttcgccatgttggtcaggctggtcttgaactcctgacctcaagtgattcgcccatcttggcctcccaaagtgctgagattacaggcatgagtcaccgtgcccggccttaaactttctgaaaaagttttgtgatcaagattacacaactcgtagaacaaaaagaaaggtatagtaactattcttaccgttctctggatgtaactctacgtctcttctcatcctgtgtggagggaaggaagaacaaaaaagattagaatactggtttcaagggaaggtcaacaccaaaagtgtgagttgaaatattaacacatttgacatggttagagcaagagtgggaaaagaaggggcctgggttttggggagaagatctgagaaactcttactctggtattaatccccaccaaccccaaaacaaaagcaggtccgagaagtaggcaggcacactgcccatcactagagatcgcctggtgatactatgtaaaagaatcaaagattctccatcttgtgtcaggaatttgtttaatttatttgttagagaccagtctgggcaacatgggaaacctcatctctacaaaaaatacaaaacttagctcattggcatgcgcctgtagtcccagctgcttgggagggtgaggtgggaggatcgcttaagcccaggaggttgaggctgcagtgagccatgactgcgccactgcaccccagcctggtgacagaatgagacctgtctcaaagaaaagaaaagaaaagaaaaaagacagaactgtaatcccaacactttgggaggctgaagcgggtggatcacttgaggtcaggagttcaagaccagcctggccaacacagtgaaatcccatctctactaaaaatataaaaattagctgggtatgatggcacatgccttgtagtctcagctactcaggaagctgaggatggagagtcacttgaacccaggaggcggaggttgcagtgagctgagatcgtgccactgcactccatcctgagtgaaagagtgagactccatctaaaaaaaattaaaaacaacaacaacaacaacaaaaaaaacaaattggctgggcacggtggctcacacctataatcctggcactttgggaggctgaggcgggcagattgcctaagctcaaggagttcgagaccagcctgggcaacatgggagaccagcctgggcaacatggtgaaaccccatccctactaaaatacaaaaattagccgggcgtggtggcacgcgcctgtagtcccagctactcgggaggctgaagcaggagaatcacttgaacccgggaggctgaggttgcaatgaaccaagattgtgccacaagagcaaaaccctgtctcaaaaaaaaaaaaaagtctcaaaaaaagaagtctaaatacatacatacatacacacacacacacacacacacacacacacacacacacacacacatatatataacatgtatgtatgtaagactgccttgccacttgagctatgacatcatttctcccctggacctccagcctgccctgcagatttcaaatttgctggctttcacaatcttgtgagccaatttctcaaaataaagtctctccccataaatatatattccaactatgtacccataaaaacaagaaaaaaatcaaacgaattatatatatatacatacacgtgcatatgtatatatgtacctatagctgtatacacacatatacattctattggtcctgtctctctggagagccctaaatagagccctagacagggtttttatttacttggacagaacacatatgaagtcacaatcatcaaatacaccaagttaaggtagagtcaggaaatgaaagcactggccctacctggtctttgtcttcttccttgatggactcatccgatttggctctttcagactcttcctgaggtttccgtttggcagggctgtcacacacagtgaggccaaccattagtggaacaagaccctaggcctccagctggcctgaagtggaccctcattcaccaggatgttgaaagaggcttcaagtttaatgtttctctgaatgacgggtttagaatgttgtcttgccatcttgtaagtcctaagaaatcacgggtctaaacaccgatcaacagctgctagtgtcagagaagagacctcacacacctttctgatggagggacacagcaccatccataaagtcagcctcagaccaggtgcagtggctcacgcctataatcccagcactttgggagtccaaggcatgaggatcacctgagttcaggagtttcagaccagcctggccaacgtggtaaaaccctgtctctaccaaaaatacaaacattagccaggggttgtggcgggcacttgtaatcccagctactcaggaggctgaggcaggagaatcgcttgaacctgggaggtggaggttgcagtgagccgaaatcatgccactgcactccagcctgggctacagagcaagactccgtatcaaaaaaaaaaaaaagtcagtctcaaaaaataaaaagctggaatctgatcagtcctgtaatcctatcagtttatagggaacagaaggcaaggggacctgtggaacaccacaaggatgcaatcggcccaatctaggaactattggacaaatgaatttcttcaagtaaatggcaagaagataagagatgaaggaatttaaaatctgtgaggaattttaagtaaaataggagggaaggaatctataactttaaggaacaagtcaaccaaacgctgtctgtttgccacacggcttgttcaccacaaagggaaaaacgtaaataccaactatatatctgatagcagggaattcttacatttttataaagacatcagaacagtattatactttggtttgttaaaaagactgttttggctgggcacggtggctcacgcctgtaaccccagcactttgggaggttgaagtgggcagatcacctgaggtcaggagtttgagaccagtctggccaacatagtgaaaccccacctctactaaaaatacaaaaattagccaggcgtggcggcgcgcgcctgtaatcccagatactcaggaggctgaggcaggagaatcacttgaacccgggaggcagaggttgcagtgagccgagatcgtgccactgcactccagcctgggtgacagccagatgctgtctcaaaaaaaaaagactgctaaatgttagcaattattgtaaaatatgagtaattttttaaaaagttgtcaaaagagatctcattgtctagaaatatactaaactatatatggacaaagtaatccaggtggggcagggacacacaatatgggggtatagatgaaacaacggctgtaacttgataactgttggcactagatgatgggtatttcagggttcattatacaaaactcatgattttgtgtacatttgaactttcctatatgagtaaaaacaggtaacgttttcagaaatgctattcataaatgtctagagaacagaaccgcaagatgaaaacctatacaacacggaagacagaattgccacgtgacgccctaccaattccatcccaaaacagccggcccctaaaaaaggcagccgccaatttatcgtatactgacccctttgcaaaatgagatgtgatggtggtttgcctggtgcttttccttgtaatcctggggctaggtgaaggttcagctgtttaaagaagaaaaagcattaaaaagaaaaaaaaaagccactatcaatagaaagcccacagcaataatgcagttcaacattactaagctattgcaggaagccaggttctaaggactaagcatctttgcatttttattctagtcaacaaccagcttgctaatgttggcagttagcacctgccagtttgttgagccatatcatgtcagttatttgaggggccaaatgctaaagaaggccaggaaacagagcctcttgttaaaatatcaaaagatgaagtgggccaggcacagtggctcacatctataataccaaaactttgagaggctgaggtgggaaaataatccaagctcaggtattcgagaacagcctggacaacatggcaaacccccatctctactaaaaatacaaaaaaattagctgggcgtggtggtacacacctataatcccagctattcaagaggctgaggcacaagaatcacttgaacccaggagatgggggttgccgtgagccaagatcgcgccactgtacacagccttggcgacagagcaagaccctgtctcttaaaaaaaaaaaaaaaagaaaagaaagaaagaaaaaaaagaaataggccaggtgcagtggctcatgcctgtaatcccagcactttgggaggcaagacgggcagatcacaaggtcaagagatcgagaccatcctggccaacatggtgaaaccccgtctctattaaaaatacaaaaattagctgggcgtggtggcacgtgcctgtagtcccagctcctcaggaggctgaggcaaaaaaatcacttgaacccaggaggtggaggttgtggtgagccgagattgtgccactgcactccagcctggcaacagagtaagactccatctcaaaaaaaaataaaataaagggccaggtgaggtggcttacacctgtaatctcagcactttgggaggccaaggcaggtggatcacctgaggtcaggagttcgagaccaccttggccaacatggtgaaaccctgtctctactaaaaatacaaaaattaactgggcgtggtggcgcatgcctccatctcaaaaaataaaataaaaattaaaagaaaataaaataaggctgggcatggtggctcacgcctgtaatcccaacactttgggaggccgaggcaggtggatcacgaggtcgggatattgagaccatcctggctaacacagtgaaaccccatcctactaaaaatacaaaaaattatccaggcgtggtgtgcgcctgtagtcccagctacttgggaggctgaggcaggagaatggcatgaacctgggaggtggagcttgcagtgagccgagatcgtgccactgggcaacagagcgagattctctctcaaaaataataataaaataaaacaaaataaaaatgaagtagctgagaaccagacctgagctcaagtactatcctattgtttgttttttaaaaaattccagaagaggctgggcgcggtggctcacgcctgtaatcccagcactttgggaggccgaggcgggcggatcatgaggtcaggagatcgaaatcatcctggctaatatggtgaaatcccgtctctactaaaaaatacaaaaaaaattagccgggcatggtggcgggcgcctgtagtcccagctactcgggaggctgaggcaaaagaatggcatgaacctgggaggcagagcttgcagtgagccgagattgcgccactgcacttcagcctgggagacaacaagactccatctcaaaaaaaaaaaaaaaaaaaaaaaatttccattagagttcctttgcctaaaactgggcaagagtctgagaataaatgtttaaccaggcatataaggtcttagaaggagtaagtatttgtagcacttgtcatctgcaacctgtcacactcatagccatgttttgggatctaatgctgcaacttggtcgaaaacaacatttttttttttttgagacagtgtcttactcttgttgcccaggctggaattacagacacccgccaccacgtctggcaaattttttgtattttcagtagagacagggttttgccatgttgggcagggtggtctcgaactcctgacctcaggtgatccagccaccttggccacccaaagtgcagggattacaggcatgagccaccacacccccagctaagacaaaatttaaagacgtacacatctaagctagttaggaagtgtccagtaattactagtgaggatgcgtacaaaagaaaggaacctggacacactgacctggggtccaagtttaactgcccccttatatgctaccaaagcctgcttctaggttgaaaatgagccaagtggggccgggcacggtggctcacacctgtaatcccagcactttgggaagctaaggcgggaggaccacttgaggtcaggagttccagaccagtctggccaacatggtgaaaccccatctctactaaaaatacaaagattagctgggcatggtggtgcccgcctgtaatactagctacttgggaggctgaggcaggagaatcgcttgaaactgggaggcggaggttgcagtgagccgagatcgcgccattgcactctatcctgggcgatagagcaagactctgtcattaaaaaaaaaaaaaaaagaaagaaagaaagagagttaagcagggccaggcgtggtggcttatgcctgtaatcccagcactttgggaggccaaggcaggtggattacttgaggtcaggagttctggaccagcctggccaacatggtaagaccccatctctactaaatacaaaaattagctgggtgtggtggcacatacctctaatcccagttacttgggaggctgaggcaggagggtctcttgaacctgggaggcagaggttacagtgagccgaggttacaccactgtgctccagactgggcaacacagtgagactccatctcaaaaacaattaaaaataaaaggaatcatctgctcttacgcttagcctctccatcggacttgctcctcctgggcgtgcgaggtttggaaaggggtttgggggggctgttggcatctgccattcccactctacgggcttcacttcttgcttggttcccgttttctagacgtccattcacttcccggttgtaagcatgagcaccgttctccaaggacaaatctttatttaaaagggatttgactttagccaggtagccctcctacagcaggaaaggataatttaagtagcagtgaatgtaaacaagtgtcagagaacaaggaaacacatgtgtttccttcatcatcatcatcatcatcatcatcatcaggcaatgaggacagctggggatcttgctgcctccctggtcacagacaagttactaggaggagacatttttctagaggctaggatgctgagaactgacttacctcggataattcttctttacgtaatttggtttccaagtcacataactgattctttatttctgtttgcagaaattcgtgcaagagattcaatttctccttcacacattcctaagggaaggatataggtttagcagtacccacattcccaagctattcactagtggactaatacacaaattattgagctgcctgatcacatcacaatgagtgaatggcaggcaatgctgtctcagtcaaaacactaaacagtcatgaaatgtgttcagggaatttccattaggatcacttcactcctgtctccaaagtggtgaaaaatgggaaagctggaggtgagatggagacatatcatggtttataagaataatactgtgcttctgtaaagtgtcggccaggcacagtggctcacacctataatcccagcactttgggaggccgaggcaagtggattgctttgagccccagagttcaagaccagcctggggcaacatgacaaaatcccatctttacaaaaaatatttaaaaattagctgggcatggtggcttgagcctgtagttagagctactcaggaggctgagtgggaaaatcacttgagcctgggaggcgaaggttgcagtgagccaaaattgtgccactgcactccagcctgggctacagaatgagaccctatctcaaaacaataacaaaaacacaataaaacagtgttaccaggacaagttacaatccagagtagattgtttaggaactgagattggttaaaaaaaaaaaaaacctgggccaggcatggtggctcacgcctgtaattccagcactttgggaggccaaggtgggcagatcacgagcaggcgttcaagaccagtctggccaacatggtgaaaccccatctctactaataatataaaaattagctgggcatggtggtgcgtgcctgtagtcccagctacttgggaggctgaggcaggagaacagcttgaatccgggaggcagaggtcacagtgagccgagatcatgccattgcactctagcctgggtgacagagtgagactctgtctcaaaaaacaaaaacaacaacaaaaaaaaacaccaccaccacccaactattagcagcaaattagtgctgacatttaacaagaatatccaaattatctttgaaactccatgggaaaaaatgcaaaatccatttaaagaaaacaaatttctttttatgagccacaaagtgtgtcagtcagatttggtaataagaaaaattttaaggtggagattaccttttctgttaagctgtctctttccaaatctttgagcctgggaggaagaaataggggagaaaatacaaacacttgttaagcaacttcatttgcctgtaagaatatcacagttctaaagaagttttggacacaaacaagtttaacatatgagtgttagaaaaaactaagctggcttttgtctccccgcaagagtctagagtgtcctactggaatgcctaatgctaagaagtcatctgatctgaacaaggttccccttttgggggtcatttttctgatgattgtgagattacatagcagctctgtaacacaattatgtgtatgtgtgtgtgtgtgtatatatatacatatatatgtgtatatatatacatatatatgtgtatatatatgtgtgtatatatatacatatatatgtgtatatatatgtgtgtatatatatacatatatatgtgtatatatatgtgtgtatatatatacatatatatgtgtatatgtgtatatatacatatgtgtatatatatatacacacacacacagcagctctgtaacagagtatgtgtgtatatatgtatgtatatatgtgtatatatatacacacacatatatacatacatacatatacattatacagatagatagacagacagacagacatggagtctcgctctgttgcccaggctggagtgcagtggtgcgatctcagctcactgcaaccctcaccttctgggttcaagtgattctctcacctcagcctcccaagtagctgggattataggtgccaccagcctcgttaattttttgtattttgagtagagacagggtttcaccatgttggttaagctggtcttagattcctgacctcaagtgatccgcctgcctcagtctcctgaagtgctaggattacaggcatgagtcaccatgtctggcatgcatatatatatacacgtatatatatacacgtatatgtgtgtatatatacatatatatgtgtatatatacgtatatatgtgtatacatacgtatatatgtatacatatgtgtgtgtatatatatatacacgtatatatacgtgtgtatatatatatatattttttttttttgagatagggttttgctcttgttgcccaggctggagtgcaatggtgtgatctcagctcaacctccgactcccaggttcaagcgattctcctggctcagcctcccgagtagctgggattacaggcatgcaccaccacacccagctaattttatatttttagcagagacagggtttctccgtgttggtcaggctggtttcgaactcccgacctcaggcgatccacctgcctcagcctcccaaagtgctgggattacaggcatgagccatcatgcccagcctgtatattttaaaaggtaccagagaccaggcatggtggctcacgcttataatcccagcactttgggaggccaaggcgagcggatcacttgagcccaggcgttcagaccagcctgggaaacatggcgaaactccatctctacaaaaatacaaaaattagtggctgggcgtggtggctgatgcctggaatcccaacatacagcagcagttgggtggattacctgagggccaaggtgggtggattacctgaggtcaagggtttgagaccagcctggccaacatggcgaaaccccatctctactaaaaatacaaaaattagccaggcgtggtggtgggtggctgtaatcccagcaacttgggaggctgaggcaggagaatcacttgaacccgggaggcagaggttgcagtgagctggtcacaccattgcactctagcctgggcaacaagagtgaaactctgtctcaaaataaaataaaataaaataaaataaaaataactgggtttggtggcatgtgcttgtggtcccagttacttgggaggctgaggaaggaagatcacctgagcctgggaggtcgaggccacagtgagccgtgattgcatcactgcactccaatctaggagacagagtgagaccctgactcaaaaagataccaggaaagagggggcaggtcatatagttggggcactcccgtaagggaaatgacctacagctggtctttctccagttgggtctgacaacagcccataacaaggtgtgccacagtatggccagtgtcagaatgagtagcccagggccacaggacactgtggggaacagccagctgatgttcctaaaggcctggtggggggtggtggcattttgaggatgaaatgggggagtcaagcatccagggaagcaaggggtacccacacagagggcagatagaggtgaagttagaggaggtggctggcgcctccccgaataactcattcttcaggatgtctctagctagtcattcctaaatgtagaactgccaggagtttgcctgggaaatcgtggtctgatttgattactgacaattagtagcttgactctttcagggacaaagagggaaaaaaataaaagaacaatagccggtgcagtgccgcggtgctgcgtgcctgtaaccccagctactcaggaggctgtggtgggaggatggcttgtgggcaggagttcgagtccagcctggacaacatagggcgatcctatctcttcagaaaaaaataaaggaacaagaagagaaggtaccaaggaaagggagaggaacacaggctgttgttcccagcctgggtgctaactacagactgcggggtgagaacaggcctaaccagctgggtaagtgtctgttggtggagagaaggtgccccaggcagggaccaggccactgccatctctggacctttccacctagcacccgcacagacaggtgctcagttatcatttgcctgaagggcagaagtggctcctccaggctggccttcctagagggtaagtgcaggcagcagcatgaggaatgctttgctggacccatgtcttacaacagctgctctgggtcatgcgggccctgattccccaccagcgccgctcacatatgagcacctgctgaatgccaggccctgctccaggcaaagagctaagtgattagatgtaggtgtcactaggcagggacttcctgacttgctgtgtggttaggaaagaccattctgtagggccgggcacggtggctcacgcctgtaatcccagcactttggaaggctgaggtgggcggatcatgaggtcaggagatggagaccatcctggctaacacagtgaaaccccgcctctactaaaaatacaaaaaattagccaggcgtggtggtgggcgcctgtagtcccagctactcaggaggctgaggcagaagaatggcgtgaacccgggaggtgaagcttgcagtgagccaagatcatgccactgcactccagcctgggcaacagagcaaaactctgtctcaaaaaaaaaaaaaaaagactgctctgtagaagagacacttagcaccctacaaacacagtggtaatatagactgtatattatatatactgtatcacttggactcaaggtgctacaaggccaggcaagacgcagtggctcatgcctgtaatcccagcaccttgggaggccaaggcaggaggatcacttgaggtcaggagtttgagaccagcctgggctacactgagagatcccatctctacaaaaaaaatgtaaaaattagctgggtgtggttagtgtgcacctgtggtaccagctacttgggaggctgaggtgggaggatcgcttgagcctgggaggttgaggctgcagtgagttatgatggtaccactgcaatccagcctgttcagcctgggcaacagaacaagaccctgtctcaaaagaaaaaaaaaaaaaaaaaaagatgctttgacatcaggatttccaggagcacaaggaacctcttccaggcaaaagtcattctacccttgtagcaactggggtccaaggagagccttaagtcaggagggctacagaaactggtacttccagccagaggcacacacgctgtggtaatagcgttacacttgacttctcagtcacgccgctgagaaaactggaaggacatggcttctacctcgaccaagccagccagtcccctgatcccgaggttgcctggggtgtgaaggacaaggttcaactgattgcggagaccaaggtgtccttgcagaatgggtctgctttctttcaacccctcatatgaactgggatatttagcctggcaaagagaatagagaaaccttcaaaacccctagaatgtttcatccagtagaaactggatttaacctgcctggccccagagtggcaggtgggatcccaggcaggcagtgaggagctggcgggagggtaactttagcgacatcccttccctggtaaaactgtgatgacaccgatcacacctgctgaagccaggagggtcgcagacagccgtgaaggacggagcagaggactcagaatgccggcttagtgcccagcctgagaccctatgattccttcctagtgcttccctcagagatgaaccctctgcagaggggagataagatatatataaacagctggccaggcacggtggctcatgcctgtaatcccagcactttgggaggccgaggcgggcggatcacctgaggtcaggagttcgagaccagcctgaccaacatgaagaaacttcgtctttactaaaaatccagaatcagccaggcatggtggcacatgcctataatcccagctactcaggaggctgaggcaggagaatcgcttgaacccgggaggtggaggctgcggtgagccaaggtcacgtcattgcactccagcctggacaacaagagtgaaactccgtctcaaaaaaaaaaaaaaaaaaaaagatatatataaacaaccacagaggaataaggcaaatacagctcacgcctgcgggattcccaagagaaagggtataacagcctcaggaagaagttgacagctctgtgtgaaccgggcacaggaagctgctcaaacaggggcaccattgagaagtggctggttctggaaacacacaagaaacaaacgtgagactggccacatacagggagggaaaggcacctccagagaggtggctggggacagtcggagggagggcaaaagcatcacacttatccatcttgttccatagttaacaaacaccaaagcagtcaaggggaagtagaaccaatgacatcagagccgtgttaagaaaactaacccagcagaggtatctagtatagattggataggaagaaattataaaatgttagattactctaacacctctacgccagaaatgctcgtctgaaatacagcagaccatggctgggcgcagtggctcatgcctgtaatctctacactcgggaagccaggacaggaagatcacttgagcccaggaattcgagactagcctgggcaacagagcgagaccctgtctctacaagaaagaataattagctggctgtggtagcatgcacctatagtcttagctactcgggaggcagaggcgggaggatcactagagctcaggaatttgtgaccagcctgggcaatacagtgagaccctgtctctacgagaaaacagtaattagctgggtatgacagcacgcacctgtactcctagctgctcaggaggccgaggcggaaggatcactagagcccaggaatttgagaccagcctgggcaacacagcgagaacctgtctctacaaaaaatagtaattagctgggtgtggtggcatgcacctatagtcttagctactcaggaggctgaggcgggaggatcactagagcccaggaattcaagaccagcctgagcaacacagcgagaccctgtctctacaaaaaatagtaattagtaattagctgggtgtgctagcatgtgcctataggcctagctactcgggaagccaaagcgggaggatcaatagagctcaggaattcaagaccagcctgggcaacacagcagagaccctgcctaaacaaaaaatagtaattagcttggtgtggcagcatgcacctgtggtcctagctactcaggagactgaggcaggaggatcactagagcccagtgagctataattgtgccgctgcattccagcctgggtgacacagcaagaccttgtctctaaaaataaaatatagtggaccatgcaagacaagttacaagtctctgtcaaaccagcttcttcaggccggctgcatggcagctggagcagggctgcccaagaaggcatccgcagtaggcaaaagagtagacccactgggcacagtggctcatgcctgtaatcccagcactttgggaggctgaagcgggtagatcacctgagctcaggagttcaagaccagcctgggaaacatggcaaaaccccatctctactaaaaatacaaaaattaaccgggcttggtggctcacgcctgtaatcccagctactcaagaggctgaggcacaagaatcatttgaacccaggaagcagaagttgcagtgagccgagatcatgccactgcactccagcctgggtgacagagcgagactccatctcaaaaagagtggacccaccgaaaaatgttcatgccctaatccctggaacctgtgaatatattactttacgtggccaaagcgattttgcagatgtaactaagaatacagaccttgagatggggagattatcctggattatctggggtgggcccaatctaatcacttcagcccttaagaacacagaacctttctagctgcagagagcgggcaacgttggaggacgggtcagagagagatgcaacccgcaaatgctgactttaaaggtagaggaagggggcatgagccgagggatgagaccgcctccagaagcgggcaacgaccctcagtttagaaccagtgaagaaaatgggacctgagtcttacaactaccaccttctgccaacaccccaaaataggaaacagattctcccctggagcccccagaaaggaatgcagcctgcttacaccttgattttcatccggtgaaacccacatcagatttctgacctgcataaggtaataaatgtatgtcctttaagccggcaagtttgaggcaagaccctccacctgcaaaaagattatgaatcgctgaagactcagatgattttttttttttttttgagacggagtctcgctctgttgcccaggctggagttcagtggcatgatctcggctcactgcaacctccgcctcccaagttcaagcaattttcctgcctcagcctcccatggagctgggactataggcgtgtgccaccatgcctggctaattttttttgtatttttagtagagacggggtttcaccgtgttagccaggatggtctcgatctcctgacctcgtgatctgcccaccttggcctcccaaagtgctgggattacaggcgtgagccaccacgcccagctgatttttttttttttttgagacagagtctcactccttcacccaggctggagtgcagtggcacaatcatggcaaactgcagcctcgacctcatgggttcaagtgatcctcccacctctgcctcccgagtagctgggaccccaggtgcatgccaccacttttggctttatttttttttttgagatggggggggtcttcctatgttgcccagactagtcttgaactccttggctcaagcgatcctcctgccttggcctcccaaactgctgggattacaggcatgagccactgcacacggcctagtctaataacttttacacatactaggaaaccaaaatgtgtgtgtgactcactttcttgctagattcactttactgcagtggtctggaaccaaacccacagcatccccactgtacacacagtaccacgtaataaccagtgatgaagggctttggacaggtgctgctctcaacatatctgtactgataagctcagtcttcctaacacccctgtcgagcaggcagccccaccccctttttatagatgaaacaccaaggcaccaagaagttcaataacttagccatacggctggcaagtagggcggcatttgaaacccagcagtctgtacccctagaattctaccacaggggagcaaaacaaaagaggtaagtcaattttgccttattcagtatgtactcagtagtagccaaggaactggagttaaggagttcaagacctagcttaatcccatcacagaatgactagcagtaagaaagctgtggtagttacgaaagctaatcagttgtgcaaaggagtctgctagcatcagtgttaatccaggctgtacaggggaagagctggcatgcaagcatttgagtctactgtgctccaagctgcagatacagtgaatacggcagacacgctctggtaacagaccctgaaataatcactaatttcagtgttataatggcaccatgcgggatacaccgacaaaattcaacactctttattgtggagaagcaagcctagctgtctgagagcaggcttaagaatgaattaaaaggccaggcacggtggctcatgcctgtaatcccaacactttgcggggctgaggcaggcgaatcacttgagtccaggagttcaacaccagcctggccaacacggtaaaccccggtttctactaaaaataagaaaaagttagccgggcgtggtggcacatgcctgtaatcccagctactcaggaggctaaggcaggagaatcacttgaacccgggagggggaggttgcagtgagccaagttcgcaccactgcactccagcctgggcgacagcacaagactctgtctcaaaaataaaataaaataaaataaaataaaataaaataaaataaaataaaataaaataaaaacaatgaaccggctggacaccatcatacctgtaatcccagcattttgggaggctaagataagtggatcacttgagatcaagagtttgaaaccagcctggtcaacatggcaaaacccagtctctaataaaaatacaaaaattacctgggcttggtggcgggcgcctgtaatcccagctacttgggacactgaagtaggagaattgcttgaactcgggaggtggaggttgcagtgagccgagatcacggccactgcactccagcctgggcgacagagcaaggctcagcctcgagggggaaaaagaaaaattagctgggcgtggtggtgcacacctgtaatcccagctacttgggaagctgagacaggagaattgcttaaacccgggaagcggaggctgcagtgagctgagatcacaccattgcactctagcctgggccacagagcaagaccctgcctcaattaaaaaaaaaaaaaaatctaagtttcaagtactgttggataccatgtttatttttcatttaatgaaatattttcaaaatgtaaaaaaaaaaaaaaaagtctgtggagtgagtcatataaactacaatttcaatgtctaccacatggtcaaaagcagtcctccaaaactccaatgcctacagtgaagcaatctgagtgtaaagaaatgtggaacccagggtcagtggtggattgtaaggctcacctaatggtattccaattcagccaaacaaaatatttgcacagggccaacagagcccctgagccagtggcctactggcaacccctgttgaagggaaaggctttggcaagcagcagaccttagcaggaattcctgcttcctggcagttaactcctgcagcatccacttttaagaactcttgaggaataatggccgggccctgtggctcacgcctgtaatctcagccctttgggaggccaacgcagaggattgcttcagtccaggagttcaagaccagcctgggcaacaaagcaagaccctcatctctaaaaaaaaaaattttttttttttctgagacagagtttcgctcctgttgcccaggctggagtgcaacggtgcaatctcggctcctgggttcaagcgattatcctgcctcagcctcccgagtagctgcgattacaggcacctgccaccatacctggctaatttttttgtatttttagtagagatggggtttcgccacgttggccaggctggtctcaaactcctgacctcaggtgatctgcccatctcagcctcccaaagtgctgggattacagacgtgagccaccgcgcccagccttctaaaaaattttttaaggattaacttgggcatggtggcatgtgccagccactcaggaggctaaggcaggaggattgcttgagctcaggggttcaaggctgcagtaagccatgactgtgccactgcattccagcctgggtgacacagtgagatcctgtctcttaaaaaaaaactgaaaaaaacaagctaagttagccactagcatgtgaacctttatgtgccatgcatattctcatttaacccaataccagctgaaaacccatgtcattattcctagactatggatatagaggtggcatacgcttgtttaaggtcattgagccagtggaggtcatgttttcaagaaggctgggcaggctgggcatggtggctcacacccgtaatcccaacactttgggaagctgaggcaggaggatcgcttgaggccaggaatcgaagaccagcctgagcaacatggcaagaccccatctctacaaaataaaaaaaaggaataaaaaaggaaggccgggcccaaacttctctgaattgggtgtaacatcatgaagccaggcactttcataatttcacttccattccattttaaatcaagttttattttgggagaatactggcacagatgattcaagaagatatatacccactaactggttaagaagtggtttgactataatcccagcactttgggaggctgaggcaggtggatcacgaggtcaggagttcgagaccagcctgaccaacatggagaaaccccgactccactgaaaacacaaaaattagccaggcgtggtggtgtgcacctgtaatcccagctacttcggaggctgaggcaggagaatcacttgaaccctgaaagtggaggttgcagtgagccgagatcacgccaccgcattccagcctgggtgaaagaatgagactccatctcaaacaaacaaacaaaaaaaagtagtagttaaggcatgatggctcatacttgtaatcctaacctttgggacacaaaggcaggaggactgcttgagggcaggggtttaagaccagcctgggcaatatggtgaaacctcacgtatacagaaacaaaaactaagaaagtcatctgggcatggtggtgggcgcctgtggtcccagctactcaggaggctgaggatcccttaagcccaggagttcaaggctacagtgagttataattgtgccagggcactccagcctggacaacagagtgagacccatctctaaaaataaaaagtgtttctttttttgagacagggtctcactctgtcacccaggctggagtgcaatagcgcgatctcagctcgctacacacagcctcaacctctggggctcaagtgatactcccaccttagtctgttgagtagttgggaccacaggcgcacggcactactccaggctaatttttgtatttttagtagacatggggttttgccttgttgcccaggctggtctcaaactcctggctcaagagattcgtccgccactgcctcccaaattgctgggattacaggcataagccacagcacccagccttcaaaaaaaaaaaaaaaaagaaaagaaaaaaagcgggggttgaaccaaatatccatccctccccaaagacccaaatcagaaccggactggcccaaccaggtcagttaacaagcctaaggaaatagaaaaatggcaaagagtgctttcacaaatccagctggaagtgtccacgcctggtgagggttcctctgactcacgcacacctcacttgaacaagttttcaggaatgaactgatggcgttcatgaacaaggggctgggaccagtgctcccactgatccttgtgcacggaagttggacagaggcatgaactgctaaagccagggcctccaacattagacacacactaaagaacacacccatgaacacacacaaacacacacgaaagtgtagccagttctcattagcaagacttccctgatgcccacggctcacaggcacagatttacaggaaaagaccaaccatgcagccttcacgcttcccgggccctgcgctgcaatgcacggttaaagttcctgccaaaacatggactttcccaaggagcaagaaccacacagtcccaactgacagaatgagtaccccacggaaggctgggctctcgaacatgagccagcccagcccaggccccgacgggtgacatccgtctctggaggccgccatcgagatgcacagctttgggggaaaggcactgagggaccccccaccacagaagcgcccccggggaccgggccggacaccggaagtggaggccgaagtgccggtgcccgaggggtgtccgttggccgcgggctgcccacttcctgtgcgaccaagctggagtcaagagcccggcccaccgctgcttgaagaaggggaccccggaaacgaacccaaagcttgctgtatttggggatcaaaagagaacccccaccccgcctagtttctagccaccagggagctacgggggaatccacggtccattttggcgccaaacagcccgggcacgcgcgaccggaagtgccaccctgcccgcgccaactgccgctgcgcgccgcaccaccccacgcatgcgcgcccgtctgtcagcagcggccaccggccaccccgaggggaagcgaccccccacccagcgccctgcctgtccccctgagtccgtgttcccccccatggtacctaccgcctgcggacatcgtcgggcagcgagatggccgggacggccagtgtgggcacccgggctggggcggtacgcgccggcatctcggaggcttcagcagacgcggcggcggcagcgcaggcgccccggcttttcgcgcggaaaccgatggggaggggcgatgagcggaggcggcgtctaccaccccagtccgggcgtgggggaggaggggatgtaccaaacggagagaggcgataccctgtgcagaaggatggaacggagccggccatgcccagggaacacgcatgcgcaaggcgggcacacaccccccccacgcggagcagtgggctcgtccaagctccacggtttgctgggaggtgggcacggtgcccgaggcattcattcattcattctttcaggtgtgatggggataaagcagcgagaagcccccaagggtttgtgagagcccttgagtaaagtcctcagttccaatccaacctccatctatttgctggctatacgaccttaggtgggtcactacggctcagcctctgtgtcctcatctgtaaaacggggtaattgcacctactctagaaaatcttgagtatacacagaatttgtagctagtaccaagaatctcacagtgtatagaggcccatgccacttctatacccagtgtgtggggggttttttgttgccttttttaagcaccacgtggctcacgcctgtcatcccagcactttgggaggccagggtgggaggatcgcttgagcccaggagttttagaccagcctaggtaacatagagaaactgcatctcaaaaaaaaaaaaaaagaaagaaagaaagaaagaaaaaaagaaaaacaaaaattagctagtcgttgtggcatgtgcccatagtccaaactactccagaggttgaggcaggaagatcacttgaaccggagaggcagaggttgcagtgagccatgattgtaccactacattccagcctgggagacagagcaagaccttgtctcaaaaaaataaaaataaaaagtaagaataaattaagaagcaccatgtcaggcgcagtggctcacgcctgtaatcccagtgctttgagaggcccaggtgggaggatcgcttgaggttaggagttcaagaccagcctgagcaacatagggataccccatctctacaaaaaatacaaagatttgctgggcatggtgacacacacctgtaatcctagctacttgggaggctgaggtgggaggatggcttgaaccctggcagtgtaggctgcaatgagccatgattgggccactggactcctgcctgggcgacagggtaagaccctgcctcactctgtcaccccggctggcgtgcagtggtgagatcttggctcactgcaacctctgcctcccaggttcaagcgattctcatgcctcagcctccctagtaggctgggattacaggcgtactccaccacgcctggctaatttttgtatcttcggtggtagagacagggtttcaccatgttggccaggctagtctgggactcctagcctcaagcagtccacttgcctcagcctcccaaagtgctgggattataggcctaagccaccgtaaccagccagaattttttttttttttaaagcaccagaacatgggggaaagattgtgtctttaacaaatggtgctgagaaaactgtataaccacatacaaaagaatgaagttggacccttaccttacaccatatacaaaaacacaaaacttattaaagattaaacataagacctgaaactatagtgctcctagaagaaaacatggggaaaagcttcatgacaatggatttggcaatgatttcttggatatgacagcaaaacacaggcaacaagacaaaagatagacaaatgggtttgcaacaaacttaaggatagctatacagcaaaagaaatgaccaacagtgaaaaggcaacctacagaatggggaaaaaaaaagtttgcaaactgtattatctggtaaagggttaatatccggaatatatgaaaaattacagccaggcatggtggttcatgcttgtgatccctgcactttgggaggcccgggtaggcagatcacttgagcccggtagttttagaccagcctgagcaacatggcaaaacctcgtctctaccaaaaaaagaagaaaaaaattatataaaaaataaattactacccgtcaggcttggtggctcacgcctgtaatcccagcactttgagaggccaaggcgggtggatcacctgaggtcaagagtttgagaccagcctggccaacatggtgaaaccctgtctctcctcaaaatataaaaatttgctgggcatggtggtgtgcctgtaatcccagctactcggaaggctgaggcaggagaatcacttgaacctgggatgcggaggttgcagtgagccgagattgcaccattgcgctccagcctgcgcaacaagagagaaactctgtctcaaataaaaatttaaaaaataataaatttctacaatgcaacaacaaaaactcgatttacaaatgagcaaatgggctgggtgcggtggctcacacctgtgatcccagcactttgggaggcccaggcggcaggcggatcacgcggtcaggagatcgagaccatcctggctaacgtggtgaaaccccatctctactaaaaatacaaaaaattagccaggcgtggtggcagtcgcctgtagtctcagctaatcaggaggctgaggcaggagaatggtgtgaacccaggaggtggagcttgcagcaagccgagattgcaccactgcactccatccagcctgggcaacagagcgagactccgtctcaaaaacaaacaaaaagagcaaatgatttgaatacatactttcccaaaggagatatgcaaatagaaaacaggcatatgaaaagatgctcaacatcactggtcatcagggaaatgcaaatcaaaaccacaatgaaatatccctaagaccccttagaatggccactgtcaaataataagtgttggtgaagatgtggagaaactggaacccttgtgcacggttgagagtcgaataaaatggtggagctgctatgagaaacagcatggaagttcctcaaaaaaattaaaaatagaattatcatatgatccagcaatcccatttctggatataaattcaaaagaattgaaaagaggatcttaaagagatatttgcatacccgtcttcattgcagcattagtcacaacagccaagagacaggaaaaaaaaaaaaaaagatcatattgctgctaagagatggggtcttgctgtgttgcccaggcaggtgtcaaactcctgggctcaaggcatactcctacctcagcttcttaagtagctgggactacaggtatgtgccaccacaatgggctaactttttatattttttgtagagacaggatttctccatgttgcccaggctggtctcaaactcctgagctcaagcgatctgctggccttggcctcccaaagcgctgggattacaggtgtaagccactgcacccagcctaattcagtctttaaaaaagaaaaaatggccaggtgcagtggctcacacctgtaatcccaacactttgggaagccaaggcgggtggatcacctgaggtcaggagttcgagaccagcctggccaacatggagaaaccccatctctactaaaaatacaaaattagctggacatagtggctcatgcctataaccccagctactccggaggctgaggcaggagaattgcttgaaccctggaggtggaggttgaggtaagctgagattacaccattgtactccagcctgggcaacaagagggaaactccatctcaaaataaataaataaataaataaataaataatataaaagtaaaaatacaaaattagctgggtatggtggcatgcacctgtaatcccagctacttaggaggttaaggcaagagtactgcttgaacccgagaggtggaggttgcagtgagctgagatcacaccattgcactccagcctgggtgacaagagtgaaactccgtctccaaaaaacaaaagaaaagaaaaaatatcttattatatgctacaacatggatgaaccttgaggacattacgcacagtgagagaacctaatcacacaaagacaaataccatacaattccacttatgaagtatctaaagtaatcaaaatcttagaaacagaaagtagaatagtggttaccaaggccgggggggaaggaggaaaaggagttattgttcaagagtttcagttttacaaaatgattccagagatctgttgcacaacaatgtgtatatactgaactgtacactgaaaaattgataagatggtaaataaaatactattagtaaatggggctaagtttttttctttttttttttcttttttttttttttttgacagagtctcactctgttgcccaagctggagtgcagtggcacgatctcggttcactgtaacctctgcctcctgggttccagcaattctcctccctcagcctcccgagtagctgggattacaggcacgcgccactacgcccagctaatttttgtatttttagcagagacagtgttttgccatgttggccaggcttgtcttgaactcctgacctcaagtgatccgcccacctcggcctcccaaagggctgggattacaggcatgagccacggcacctagccctaaaaagtactttaccttcaaccacaagaagcaccagaaaggagtttaaaattagggcatacttttacatttttgtattgcaaaatatttgtattataaaattcacaagtgaatgtgtttatatgcatgtacatatacatgcacacacagttcccccaacagctggtagggaagggtcatcctggccagaagtgaaccttcacacagaccctccatttgctatgaattgctcacacttggcaggacccaggaagactgaataataagactaaaattcccagcgattaatattgaatcagcacttacgtagtctaccaggctctttagataactttttctttttcaattttttttttttaatagagacagggtcttactatgttgcccaggctggtcttgaactcttgagctcaagcaattacaggcatgagccactgtgcctggggctttttgtttttgttgtttgttttttgtttttgagactgagtctcgctctgtagcccaggttggagtgcagtggtgcgatctcggctgactgcaagctccgcctcccgggttcacgcaattctcctgcctcagtctcctgagtagctgggattacaggtgcccgccaccaagcccagctaattttttgtttatttttagtagagacgaggtttcactatgttggccagactggcgtctaactcctgacctcgtgatctgcctgcctcggcctcccaaattgctgggattacaggcgtgagccaccgcgcctggctgttttgttttgttttgttttttgagacagggtttcactcccgtctctcaggctggaatggaatggtgtgcaatctcggctcactgcaacctccaccttccaggctcaagcaattatcttgcctcggcctcccgagtggctaggaatacaggcatgcgccagcacgcctggttaatttttgtagagacaaggttttgccgtgttgcccaggctggtctcaaactcctgaactcaagtgatcctcctgcctcagcctcccaaagtgctataattacaggcttgagctactgtgcccagccttcttctattttgagacagggtctcactctgtcacccaggctggaatgcagtggcacgatcaccattcactgtaacctcagcctcccaagctcaagcaatcctcccatctcagcctcccaagtagctgggacccacaggcacacaccaccaggcttgactaattttttatatatttttgtagagacagggtgtcccatgttgcccagcctgggaattatttaatttaatccttaaccataaaaggtaggtagcaggaccctgtttgccatggcctgaaatattcatcacataggactctcagaggccacttacccaagatcatagactcactcagcagtacggaccatgaatccagctgtctttcatccagaacctgagggcaaaacagtggccccagggatggccagttgtccaggccatgggagaccaaagggatagcacttgaaggaagctggactagggtaggaacagaaagggaatgacagaagacagtctcaccagagtgaaccttaggcccataaacctgtcagaacccatgatcagggcccctaacccaccttagagccaggggaggaaataagaagaggggacagatgaacagacctcctactcagggacttcaacgcaaggagaccagctgcatttattggagacttcctctaagctagatttcctttgtaacagcattgtcaaccttgtcaggaagagatagcttgacccatcttccagatatggggaaaaaactcagatatggaaacgatttgccttaagggtaccctgcaagttggaatttgcttccaagttgtctgggcaaaaaatccaggcatctcctttcatgcctctccttgcctcacatgcaaaacatgagcaagctctgctggttcttcctctaaaatataagccaagtctttctacttatccacgctcctgctaccccagcccaaactgccatcatcactcacctggacttcattctagaagcctcctccctgacctcccagctgccctggagagtcccttccaaacgcttcggctagaaagctttattttatttatttatttatttatttatttatttagagacagagtcttactctgtcacccaggctggagtgcagtggcacaatctcagcccactgcaacctctgcctcccggattcaagcagttcacctgcctcagcctcccaagtagctggaattacaggcacttgccaccatgcccggctaatttttgtatttttagtaaatacaaggcttcaccatgttagccaggccaactcctgacctgtgatacacccacctcggcctctcaaagtgctgggatcacaggtgtaagccaccgcaccaggcctttttttttttttttttttttttttttgagatagagtctcactctgatgcccaggctggagtgcaatggtgtgatcttggctcactgctacctccatctcccaggttcaagcaattctcttgccttagccttccaagtagctgggactacaggaacgagccaccatgtccagctaattttttgtatttttagtagagatggggtttcaccatgttggccaggctggtctcaaacacctgacctcaagtgatccactcgcctcagcctcccaaagtactgggattataggtgtgagctacgtgtccggcctttttttaaacaacaacaacagcaacccagctagggtctcactgtcaccacaggctggagtacagtgacatgatcatagctcactacagcctcaaactcctgggctcaagcaatcctcctaccttagcctcccaaagcactgggattacaggcacgagccactgcacctggccctgagaaatgtttacaaaaataaattggaacatgccatccccttcttcaccactaaaaccttccagaacttcccattgttcttgaaataaaatctaagcattttactatttttacagggtcctgtttgggtgagtcttattcctcccttcactgagcaccagttttggggtgtttttttttttttttttgagacggagtttcactcttgttccccaagctggaatgcagtggtgtcatctcagctcactgcagcctctgcctcctgggttccagtgattctcctgcctcagcctcccgagtagctgggattataggcacgcaccaccacgcccggttaatttttgtatttttagtggagacagagtttcaccatgttggccaggctagtctcgaactcctgacctcaagtgatctgcccacctcagcctcccaaagtactaggattacaggcatgagccactgcacccggcctagctttatttacattttgtgtttttgagacagagtctcactctgtcgcccaggctggagtgtcgtggtgcaatcacagctcactgcagcctccaactcctgggctcaagcaatcaccctgcctcagcctcccaagtagctgggactacaggtacacatcaccacgtctgactagttttgttttgttttggtagagacagggtcttgctatgttgcccaggctggtcttgaactcctgggctcaagcgattctcctgcctcagcctcccaaagtactgggattacaagtatgagccactgcccctggcctctcaagttcttaagtgccccaaagcctttgtttttgctgccacttctgcccaaatcaaccttctggaagattcacacagctcaacgttgcctcaaaacagaggcttccccagaccactgggaagcaaccctttacccacctagtcatgctttactattactgttttttcgtagcatttaccactgtcaaagattctttttttttttttttttctttcttagagtcttgctctgtcacccaggctggagtgcagtggtgcaatctcaactcactgcaacctctatcttccaggttcaggcaattatcctgcctcagcttcctgagtggctgggattccaggcacccaccacctggctaattttttgtatttttttagtagagacgggggtttcaccatgttggccaggctggtctcgaactcctgaactcaggtgatctgcctgcctccgcctcccaaagtgctaggattacaggtgtaagccactgcacccagcctgagattttcttatttactatctatcgtaatctgtctgtcccacaagaacaaagcagggattggcacacattttctctaaagaaccagataaatatttcgggtttcatgagccacacattctatgccccaactactcaaacctgccatcatcaaagtgcagaaatagccatcaccaatatgtaaatgagtaggtatgactgtgttccagtaaaactttatttataaaaacagatggccagccagatttggccttcaggccttagtgtgctgactcctccacagactacaagcttcagaggaatgcaaatataggttgaattaacatataggacatgaggccaggcatggtggctcacacctgtaatcccagcactttgcgaggccaagtcaggtagatcacctgaggtcaggagttcgagaccagcctggctaacattgtgaaactccatctctactaaaaacacaaaaattaggccagacacgatggttcacacctgtaatcccagcactttgggaggccaaggcaggcagatcacctgaggtcaggagtcgagaccagcctggccaacatggtgaaaccctgtctctactaaaaatacaaaaattagctgggcatggtggcgtgcacctgtagtcccggctacccagaaggctgaggcaggagaattgcttgaacccaggaggcggaggttgcagtgagccaagatcgtgccattgcactcaagcctgggcaacagaacaagactctgtctcaaaaaaaaccctcaaaaattagccgtgtgtggtgtcatgcacctgtagttccagctactcaggaggctgagacaggagaattgcttgaacccgggaggcggaggttgcagtgagccaagatcacaacactgcactccaacctgggcgacagagcgagaccctgtctcaaaataaataaaagtaaagttgtttttcccccaacaacagtgtcatttccatttcacaaacagaaacccaaaccagatcaggttacaaacctagttttgtctccagttcctgggtcatttgctttgttcacttgaccactagaaatctcaaacaaagggccaggcacagtgactcacacctgtaatcccagcactttgggaggccgaggcaggtggatcgcttgaggtcaagaatttgagaccagcctggccaaaatggttaaacctcatctatgctaaaaatatgaaaattagctgggtgcagtggctcacacctataatcccagctacttgggaggctgaggcaggagaatcgcttgaacccgggagtttgaggttgtagtgagctgagattgtgccactgcactccagcctgggcaacagagtgagactccatcaagaaagagagagagagaaagacacacagagagagagaaagcaagagaaagagagagagagacagagagagagaaagagagagagagaaagagagagagagaaagagagagaaagagagaaagagaaaaagagagagaaagagagaaagagacagagagagaaagagagaaagagaaaaagagagagaaagaaagagagagagaaagagagaaaaagaggaagagagagaaagagaggaagagagagagagaaagagagagagaaaggaaagagaaaagaaaagaaaggagaaggcctggcgcggtggctcacgcctgtaatcccagcactttgggaggccaaggcgggcggatcacgaggtcaggagatcgagactatcctggctaacacagtgaaaccccgtctctactaaaaatacaaaaaaaatagctgggcgtggtggtgagcacctgtaatcccagctactcgggaggctgaggcgggagaatggcgtgaacccgggaggcggagcttgcagtgagccgagattgcaccattgcactccagcctgggtgaaagtgtgagactctgtctcaaaaaaaaaaaaaatgaaaggagaaaagaaagaccaaacaaaggtcgagtacagtggctcatgccttacctgagagaaggaagtggagcctctaaaagaaaacaggtacagatttcatgggcattcactctgcctccacctctcagcctccaaagtcacatttcctaatatgccacaagacagacttgccaggccaggcatggtggttcatgcctgtgatcccagcgctttgggaagctggggcaggattgcttaaggacaggaatttgaggctgcagtgagctataatcatgctactgcactctagcctgggcaacagagtaagtccacatctctaaaaaacaaaaaataaatttaggccgggcacggtggctcatgcctgtaatcccagcacactgggaggccaaggcaagtgaatcacttgaggtcaggtgtccgagactggccaccatggcgaaacctcatctctactaaaaatacaaaaattagctgggcatggtagcaggcgcctgtaattccagctactcgggaggctgaggcacaagaatcacttgaacctgggaggtggaggttgcagtgagccaagatcatgccactgcactccaccctgggtgacagaacaagactctgtccccaccaaaaagaaaaaatgtaaatgaaaaggaaagatctgccaggccatagctccttgcttcccaggccacattccagggaggccaggagaggcccagagaccagtctaaccgaggtccaggcagcccagagcacgaaggctggtggagagctggccacgtgtcctgagctacggtcagtcagaaggctgaaggtgagtcatcccagacaccgtgctcagtgccaggcccatcagaggccctgggcaggaacagcagcactcagtaacaatggggacactttaccacccttaccctggaagggcctcagaagcactctctccaggctcgacttgcctaagctaggaatcagatctgcagaaacccaagtcccatagcgtgtgctgggtagagccgcctactcctcgtggggcctttgagcaggcagacagctctctgttggggatcacaagaggcttgctgccaagccctgtgggtttttccttcaaagagcccttgagtcagctgatctgcccctcctgggcccctggcccaggtcaccctcacctttctgctggatgcctgcccagcctcattcctgggctgctacttggccccctcaccatccattcaccacggaagaagttcatcagaacccaaatctgatcatgttagctcctccctacctcaccgaatcccctgaatggcttctcagggctcttagggtaaacccaaccctaccttctccgctgcagcccacaaggcctcagtgcccagccctgtcttgtcctttcagctcctgctgcccacctattaacccactccacttgagccacatcatggacagttccagcctctttctgcctaagacatgtggtggccagcctccaagaaggccctcaatgtctcttgcctcttggtattcatgccctgccaagccttcttccatagtcagggccagtttatgtggccaagagaaggtgagtgacttccaaggctagatcataaaaggcattgcagcaccaccttgtgttccccaggaaaccagccgccatattgtaaggatgctcaaacagccctgcagggaggcccataggaagagaaaccaatttatcagccaggtgagtgagccatattggaagtagctgcactccagcccccatcagacctgcagatgggtggaaccacagatgatatgtgactgtaacctcatgagagacgcctaacagagctgctcccaaattcccagcccacagaaaccacaggatataatgcatgggtgttgttctgagccactggggtttgaggcttgttgttaatgcagccatagatatgtattgcaaggcttctgcatgtgctgtttccttagcttggaaagtcctattctacacgcccagttctcctgcttggataatctacaattattctccctattgtggctcaaccatgacctccttcaaggagcctttcctgacctcccctagccctttcaggtctttgttccatggtcttttagaagtcaggccctttctttcagagcctttaccccagctgttgatcatatattttgagatttacatcagccatacccccaccgatgcccagtgtgtagcaaagcacccaggatgtagttagcacccaataaagtgttatggagccctacacagatgagagagggtacgaagcctgttcttcccacattaaatgctcagtttacaaatatccatcaaaattaccaacaggctgggcagtggctcacacctgtaatcccagcaatctgggaggccgaggcaggtggatttgcttgagtataggaattcaaggccagcctgagcaacatgacaagactcatctctgcaaaaaaaaatacaaaaattaggctgggtggatcgcctgaggtcaggagttcaagaccagcctgaccaacatggtgaaaccccttctctactaaaaatacaaaatcagccaggcatggtggcacatgcctgtaatcccagctacttgggaggctgaggtaagagaatcgcttgaacctgggaggcagaggttgcagtgagctgagatcacgccattgcactccagcctgggcaacaaaagcaaaactccctctcaaaaaaaaaaattagctggacatgatggcaggcacctgtagtcccagctactctggaggctgaggtggaaggatcacctgagcccaaagaggttgaggctgcaatgagccatgatcacaccactgtgctcccacctgggtgacagagtaagaccctgtctcaaaaaaaaaaagacaactcagacacatcacatatctaaatacgaaagcaaagtcaggaaagcttttgaaataaaacacagaacatctatgtgacttgtggacaagcaagtgtttcttcggcaggacacaaagcacattaataaaagaaaatatgctggactctatgaaaatgagtttttgggtttttttttttttttttgagacagggtctgtctcccaggttggagtgtagtggtgcaatcacagcttactgcaatgttggactcctgggctcaagtgatcctctcacctcagcctccagagtagctagtagctggggctataggtatgcaccaccacacctggctaatttttttttttttttggtcgacacagggtcttactatgttgcccaggcaggtcttgacctcctggcctcaagtgacccttccaccttggccttccaaagtgctgggataacaagtgtgagccaccatgcccagctgaaaatgagttttggttcatcaaaagatgccattaaaaaggaagccacagacagccgggcacggtggctcacgcctgtaatcacagcactttgggaggtcgaggcgggtggatcatgatgtcaagagcttgagaccatcctggccaacatggtgaaaccctgcctctactaaaaatacaaaagttagccaggcgcagtagtgggcaccagtaatcccagatacttgggaggctgaggcagaattgcttaacccaggaggcggaggttgcagtgagccgagatcgcgccactgcactccagcctgggtgagagagcaagactccatctcaaacaaaaaaataaaagccacagacatacgtctgacaaaagactcatacctataatacatatagaactccttcaacttaatgacaatcacttttttaccaagtggctaaaagagctaaataggcacttcacaaaagaggatgcccagatggccaaggctaacgtgggaagctgctcaacttcattagtcatcagggaaatgcaaactcaatctgcaatacaatatcaccctcacacgcacacacacaaatgaaaaaaaaatttttttcaagtattggcaaaaccagaactcttctatgctgctggaggaagtctcaaatggtatagccgctttggaaaatgatttggcaacatttgctaaagccaagtctactgctgcccaggacccaccaatcccatgcctggaatgagtgtatatatctaccaattgacatgaacaaggaatgttcataatagtttactcacaatagccaaaagctgaagactacatgaacaataatagaacagataaatagttacttattcacatggaatattatacacaagggtcataaactttcttttttagaggcagggtcttgctgtgtcacccaggctggtgtgtagtgatgtgatcatagctcactgcagcctcaacctcccaggctcaagcaatccccctgcctcaggctcccaagtagtagctgagactacaggcatgcaccaccacacccagctaatttttttctttttttgtaatcccaaagagttgagattacagacatgagccactgcgcccagcaaaaaataaaaaaaatcaaaatttaagttagctgggcatggtggcacaagcctgtggtctcagctactcgggaagctgaggtgggaggatcgcttgagccctggagataaaggctgcagtgagctatgattatgccactgtactccagcctgggcaacagagcaagaccctatcttagaaaaaacagacaaacaaaaaaagtgaatttcaaaaaccttatgctgtatgaaagaaaccagtcataggagggtacatactgtgtaattctgattatagaaattaccaaggcacttatcttcatttttctcacccacttcaaacttaggcttccttttttccttccaggccacttacaccctgccttcctccctcaactcttcccagcctccttctgcctgccagggtccatgacatggccattgtccatgaaagccacaagccctagagaaaaaatgccagttacaggccagagacttgcccacctcctggagaatgacgtgaaaatacacagcgtctgctcctgaactgcaaagaaagtttccctgtctacactgcggtgagcaggaataaaagctaggcctgccctggccttaaattaagccagagggatgtcacgtgaggagactccttcctggaaaagaccaccaattaaccacagctgattctccaaaagcaatctgcaagttggggatcattagttggtgcaaaggtaattgcgatctttgctattaaaagtaatgagctgagtgcagtggctcacgcctgtaatctcagcactttgggaggccaaggcgggtggatcacgaggcaggtagatcacttgaagccaggagtttgagaccagcctggctacatgatgaaaccccgtctctactaaagatacaaaaattagctggacgtggtggtgggcacctgtaatcgcagctcctggggaggctgaggcaggagaatcacttgaacctgggaggcggaggttgcagtgagccaagatcgtgccactgcactccagcctgggagacagagtgagactccatctcaaaaaaaataaagtaacatactcattttatagatgaggccagctgacagttgtcatgtgccatccccaaaagctacttgggttgttgagtgtgggatgtgagattcaaatctgcttttcctaacttgatagtatgcacttttaacagttatgccaccacaattgccgacaacaatgaatcacatccgacccacttcatttccctttttttggacagatttgtctattcttggataagacattcaaggaagggtggtggtattgctttctttgaatttcttatccgagaatagttaaatctgtccaaaaaaagggggaaggtggtggtattgggtgtctgaattttgggcaagtatgtcagctttgtagacaaatgggaaaaaatggctagatatgaggatggagagacggtttagaaaccgtttgtaggttttttgtttgtttgtttgtttgtttgtttttagagaggcagtctcactctactgcccaggctggagtgcagtggtgccatcatagctcactgcatcctccaactcctgggttcaagtgatcctcctgctttgccctcctgaatagctgggactataggttcctgctaccatgcccaactaatttttaagattttttgtagagctgggggtgtctcactgtgttgcccaggctagtctcgaattcctggcctcaagcaatcttcccgcctgagcctcctagagcactggaattacagacatgggccacaccacgcccatccagaaaccctttgaagactgctaatgaaacaacagttccaggcaatggttatccatggatgatcaaacctttagggaaacgccaagtggggaatttacaaaggcatggtcaggcggatggcatccgaatccctggatcattcttagttatcagtgaaaagtggaaagaaaggccaggcacagtggctcatgactgtaatcctagcactttgggaggctgaggcagaaggatcacttgagcccaggagttccagactagcctgggcaacatagtgagaccttggttctacagaaaggtttttcggtttttgttttgttttgcttttgagatggggggtctcactctgtcacccaggctggagcgcaggtgggcagtctctgctcactgcagcctctgcctcctgggctcaagcaatcctccctgctcagcctcctgagtagctgggactacaggtgcatgccaccatgcccagcttttttttttttttttttgttttggtagacacagagtttcaccatgttgcccaggatggcctccaacctctgtgctcaagctattttcccacctcagccacccaaagtgctgggattacaggagtcagccaccacaccctgcccaaaaaaggtattgtagcatttttttaagtgttgctaccttttagagataaaaaaatggagtatttacaaatgaaattatttgaggcctcagatttgcttcaaaatatccagtgaggctggctgggtgtggtggctgacacctgtaatcccataatttggggaggccaaggtgggtggattgcttgagcccaagagttggagaccagcctaggcaacacagcgaaacccttctttacaaaaattagccagacatggtggcttgcacctgtagccccagctacttgagaggctgaggcaggaggatcgcttgggcctgggaggtcaaggctgtagtgagttgtgatcacaccattgcactccagcctgggcaacagagtgagacactgtctcaaaaaaaaaaatcctttgaataataattgattcaggcaagaatgaatgctgaaagagtgaaagtctgatgaataataggatatttatagagtctccacatacctccccacaagaaacttaataattacaaaccggaaagcagtaactttatagcagagacacgctggggtcttcctgccaaaaaggcacaacctgaatctaatcataaggaaacagcagacaaacccaagttgaaagacattctgcctaataactaacctacattttgttaaaacgtcaaggtcgcaaaacacaaaaaggctcagaaattgatctccgtgaaagaaactaaaaagacaactggaaacaacaactgatctgggattttcttttgctataaaggtcagtgatgtgacaatgggtgaaatctaattaggtttgcagattttctgcttttgatcattttactgaggttatgttagagaacgccttgttctggccaggtgcggtggctcacgcctgtaattctagcactttgggaggctgaggcaggcggatcacctgaggtcaggagtttgagaccagtctagccaacatggtgaaaccctgtctctactagaaatacaaaaattagccgggcgtggtggcatgcgcctataatcccagctacttgggaggctgaggcaggagaatcacttgaacctgggaggtggaggctgcagtgagccaaggctgcaccattgcactccagcctgggcaacaagagcaaaacgctgtctcaaaaaaaaaaaaaaaaaattgttgagatgggccgggcacggtggctcatgcctgtaatcccagcactttgggaggccgagacgggcggatcacaagttcaggagtttgagaccagtctggccaacatagtgaaaccctgtctctacaaaaaaatacaaaaaaaaaaaaattagccaggcatggtgggcacctgtaatcccagctactcgggaggctgaggcaggagaatcacttgaacctgggaggcagaggttgcagtgagccgagagccgccattgcactccagcccaggcgacagtgtgagactctgtctcaaaaaaaaaaaaaaaaaagaaagaaaagaaaaattgttgagatagtaatcaaaagagctcagttactcagaggctgcagaaactagaaatatgaaatctagaattgcactgcccaatattgtagctaatgatttgttaattaaaattcaataatatgtaaaattcagcccctgcctgcctcacattagtcgtatttgtaatgctcatgacagtgctgctctgaattatggagccgagaatgcttcttagaatatggtgcaagggccaggcacagtggctcacacctgtaatcccagcactttcggaagccgagatgggaggatcacttgagcccaggagtttgaggccagcttagggaacatggcaaaagcccatctctacaaataaaaaatttaaaaagtagccaggcttggtggcaagcgcctacagtcccagcttctcgggaggctgaggcaagagaatcacttgagcctgggaggttgaggctgcggtgagccgaattggcaccactgcactccagcctgggtgacagagtgagaccctgtctccaaaacaacaacaaaacagaatatagtgcaaagactatatatatatatatatatatatatatattttttttttttttttgagacagagtttcgctcttgttgcccaggctggagtgcaatggtgcagccttgactcaccgcaacctctgcctccagggttcaagcgattctcctgcctcagcctcccaagtagctgggattacaggcatgcgccaccatgcccggctaattctgtatttttagtagagacagggtttctccatgttgatcaagctggtctcaaactcctgacctcagatggtccacccgcctcagcttcccaaagtgctgggattacaggcgtgagccactgttccccggccaaggactacatatttttaaattattaggggttcctggtaagaaacacacatttctaggttcattccagacctgtttagtcagaatctctgaccatagagcttgagaatttgcatttaagcaggttcttccaggtcattcctttgttggtccctattaggcaacagcctccctaggggaaaaaggaggtgaaagtcatcttgtgtttcctgctggaaggaccactttaatttgggctccaagatttgagagctatcaacaaatgggatcttcagatccagatattgaggaggatcagatatgattgtgggcccggcgcagtggctcatgcctgtaatcccagcactttgggaggccaaggtgggtggatcatgaggtcaggagttcaagaccagcctggctaacatggtgaaaccctgtctctactaaaaatacaaaaaaattagccaggcatggtggcgggcacctgtcatcccagctacttgagaggctgaggcaaggagaatctcttgaacctgggaggcggaggttgcagtgagccgagatcgcaccattgcactacagcctgggcgacagtgcaagactccatctcaaaaaaattagctgggtatgatggtgcacgcctgtaatcccagctacttggaaggctgaggcgggagaagcgcttgaacctgggaggcagaggttgcagtgagccaagactgcgccattgcactccagcctgggtgacaagagagaaactctgtctcaaaaaaaaaaaaattagctaggcgtggtggtgcgtgcctgtaatcaccgctactagagaagctgaggcggaagaaactctcgaacctgggaggtggaggttgcagtgagccgagactgtgccactgcactccagcctgggcgatagagtgagactctatctccaaaaataaataaataaataatcatttttttgagacggggtttcgctcttcttgcccaggctggagtgcaatggtgcgatctccggcttaccacaacctctgcctcctgggttcaggcaattctcctgcctcagcctcccgagtagctgggattacaggcatgtgccaccacacccggctaattttgtatttttagtaaagacaggatttctctatgttggtcaggatggtcttgaactcccaacctcaggtgatccgcccgcctcggcctcccaaagtgctgggattacagacgtgagccaccgcgcccagctgaaaaacattttaaaaagatataagtgtggtcttcagtgactcactgggttccaatcctggccccttgactcccatgctacttgaccttgggtgaattacttaacctctctgtgcctcggtttctttatctgtcaaaaagccaataatagcacctactctataggattattgtgaggattccagaagtttgcagatgtcaaatgattctcacagtgcccagcacacgagcacacattagactttttattttttgagacagggtctcactctgttgcccaggctggaatgcagtggcatgaccacagttcattgcagcctcggtcacctaggctcaaagaatcctcccacctcagcctccagagtggccaggactatagacacgttccaccacaccagggtatatatgtatttatttacttacttttacagatgaggtctcactatgttgcccaggctcatctcaaactcctggccccaagtgatcctcccgcattggtctcccaaagggctgggattacaggcatgagccaccatgcctggccctattttcttttctttcctttttttttttttttttgagacagagtcttgctccatcacccaggctggagtgcggtggcgcgatctcggctcactgcaagctccgcctcccaggttcacgccattctcctgcctcagcctcccaagtagctgggattacaggtgcccaccaccacgcctgcttaattttgtatttttagtagagatggggtttcaccatgctggccaggctggtttcaaactcctgacctcaggtgatccactcgcctcggcattccaaagtgctgggattacaggagtgagctcccacacctggcactattttcttttcttttttttatttgtttctgttttgttttgtttgttttggtggtctaaaataaattttttaattgcacatttgtgtcttgggttatctgtggggtgagaaacctattcctcacttccaatcccagctatccaggtacaatctggtgttgtggtctggctgtgggcaaggggtacaggtgggtgcagagctggccctcgagtctgcaccaacgtcttcaaggcagggagctcagaccatggttgtacttgcactgctttggggcctcattgaagccctcacacagggacaggtcattctcagtggtcgaacagtccaggaactgcctgatcttgtaggtgcagagccccatctgtaggggctgggaggcagcaccggtgggggtctgactggccagtcggccacactgtggcttccccaaggcctggtggctgtggtgagaccttattatattagatattagatattattatattagatattagagacggcaatggcggcagcagttctgtcgcagggacaaatgccgcccccccttttttttttttttgagatgcagtttcgctcctgttgcccaggctggagtgcaaaggcgcgatcttggctcactgcaacctctgcctcccgggttcaagcaattctccagcctcagcctccccggtagctatgattacaggcgctcgccaccacgcccagctaatttttttttttgagacagagtctcactctgttgcccaggctggagtgcagtggcgcaatctcggctcactgcaacctccatcccccgggttcaagaattctcctgcctcagcctccctagtagctgcgactacaggtgcgtgccaccacgcccagctagcttttgtatttttagtagagacagggtttcaccatgttggccaggctggtcttgaactcctgacttcatgatccacccgtcttggcctcccaaagtgctgggattgcaggcatgatcccaggtgtaatcccaaaattaggcacatggcctaattttgtatttttagtagagatagggtttcaccatgctggccaggctggtttcaaactcttgaccttggctgggcacagtggctcacgcctgtaatcccagcactttgggaggcctaggcaagcagatcacttgaggccaggagttcgacaccagcctgaccaacatgatgaaacccccgtctctactataaatacaaaaattagccaggcttggtggcacatgcctgtaatgccagctactcgggaggctgaggcaggagaatcacttgaactcaggaggtggaggttgtagtgagtcgagatcacatcattgcactccagcctgggcatcagaataagactccgtctcaaaaacaaaacaaaacaaaacaaaaaaactcctgacctcaggtgatctgcccacctcggcctcccaaagtggtgggattacaggcatgagccaccgtgcccggccctattttattttcttcctagcacttaacactcactgaaatgaccatcatttgcttttgttttatttattcaacaagtatttactgaggacctactgtgtgtaggcattccaggcagagggaacagcaggtgcaaaggccctggggtgggaacatgccaagtagtgtttaagatgttagagatagccaggcatggtggctcatgcctgtaatcccagcactttgggaggctgaggtgggaggagcactgagcccaggagtttgagagcagcctgggcaacatggtgaaaccctgtctctacaaacaatacaaaaaagcaggccagtgtgttggcacatacctgtagttccacctacttgggagattgaggtgggaggatggcttgagcccaggaggtcaaggctgcggtgagctgtgattacgtcactgcactccagcctgggtgacagagtcagaccctgtatcaaaaaaaaaaaaaaagttagagagccataaatagccaggcaagttggctcacacctgtaatctcagcactttgggaggttgaggcaggcagatctcttaagcctaggagttcaagaccagcctgggcaacatggaagaatcatgtctctacaaaaaaagaaaattagcaggcttataatcccagttactaggaagcctgaggtggaagtatcacctgagcccatgagcccaggaggttgaggctgtagtgagctgtgattgcaccactgcacttgagcctgggtaacagagtaagaccttgtctcaaaaaaaaacaaaaaaacaacactggagatacattagtaaataaggcaggtgcagtcctatattcacagtgcttgtattttaatgggggtagagacagataaattgatacatattaggttggtgctaaaatcattgcggtttttgccattaaaagtcattgtaggctgggcacggtagctcacgcctgtaatcccagcactttggggggccgaggtgggtggatcacaaggtcaggagattgagaccatcctggctaacacggtgaaaccctgtctctactaaaaaaaaaaaatacaaaaaattagcctggtatggtggcgggcactagtagtcccagctactcaggaggctgaggcaggagaatggcgtgaacccaggaggcggagtttgcagtgagccgagatcgggccatacactctagcctgggtgacagagcgagactccatctcaaaaaaaaaaaaaagtcattgcggtttttgccattaaaagaaatagcaaaagtcattgcaatttttgctattaaaggtaatggcaaaaaccgcaatgacttttgcaccaacttaataatatatactgccaggtaataagcaagtgactcctttctgaggaggtggcatttgagcagagtcctgaagggggagatagagaaccctgtgggtacttggggaaaatctattgactccagcctggcctgtgcctttttcccccaccccaccccccatcccatctagggttcaggtttccaaacagaggttgttgtctcaactgctagagaaggggaattccgatgggggttgcaggccctcagcctctgcggtctgccttctctcccactggctgtcctagtctttgagctggtgttgctgtgtggggctccagcttgggtgcctagggtcccccatcaaagggttcatgcctgaaatcccagcactttgggaggccaaggtggaggcaggaggatcgcttgagcccaggagttcgagaccagcctgggcaacatagggagaccccccatctctacaaaaaaaaaaaaaaaaaaaattagccaggcatggtggtgcatgtctgtggtcccagctacttgggaggctgaagtgaaccatgatggcaccaactgcactacagcctaggcaacagagcaagaccctgtcttaaaaaacaaacaaacaaaaaaactctagacttttcttcaaaggagccactgagccggctgcctgcagacaaaagagaagagtatcaccagggaacccaccgagggacccacccgaggctgcatcctatcttggcttctcctggttcttgatgaacttcgtggctcctccttccatggcaaagagggagctaagtggcctctctctgtctttttttttgctctgctctgtcgcgcaggctggagtgcagtgccgtgatcttggctcactgcattctccacctcccggattcaagcaattctcttgcctcagcttcctgagtagctgggactacaggcacccgccaccacacccagctaatttttgtattttttgcagagacggggtttccctatgttggcaggctggtctcgaactcctgatctcaagtgacccacccacctcagcctcccaaagtgctggaattataggagtgagccactgcactcagctgagtggcctttctctagcccagtggtggatccagtatggtctggagtcagcctgcttgggttcaaatccagacaggcgctaccccgactagcgctgtgtgactctgagcagtttgcttgatctctctgaactcacacctccataagagtttatagtaacttccacctcctgagcagtcaagtctttatgcctggaaagtgctcggtgaagatcagccattacttttgggaacaccgtgtctaagggtgggtatctgggttctttgtagccccctcaaaccatctctccagctccccgggaggcacatacaattgggaggatgtaggagcctcccaccacctgccaggctgtctccttcagagaaagcagggagatcccagaccgagttaatccctgggaggtgcaggtgagttgcccctgggaaagatcccggttgacctctgttttctcctggctcaggccgggttaagggtgtcaggagcacagaatgggaaggttggcaaaggatgagttactcaggcagcagcccccctcctgttccatccagcccagccatggggcgctcctgggggaaattgctccccgaaaagacacaccaaccacaggaaacagaaattgaaccgtttattagcctaggtctgggtttcaggcattgcggaggcacgtctggggagctctatgaggggaaacaagcccctgactggctccttgccccccaaagacccgctcccccaggctttgcattcacaagaaattactctgaggcatgaggtttccttccccaaggtgagctgcaccccagctctccagtgggaggatgggccagcaattccaaaggggtctgggcaggaccagagctccccgactttggcagcttcaacacaaacatgagcagacaggacagcattcattctgggggaaatgtgacgaggagaggagggtcacagacatcacgcctatgtgcacacgcgcgcgcgcacacacatacacacacacacacataaatatacgtttgtaccgtaacatcccttccattatccacaggtttttgtgaagtccttctggggggttaggggagagtgtccccaggaaatgtccctagccactgccacccccatgctccattctatataacttgaaagaagaaggccgggcacagtggctcacgcctgtaatcccagcaattggggaggccgaggcgggcggatcacttgaggtcaggagtttgagaccagcctggccaacgtagtgaaaccctgtctctactaaaaatacaaaaattagccagacatggtggcaggtgcctgtagtcccagctactcgagaggctgaagcaggagaatcgcttgaacccgggaggtggaggtggcagtgaacggagattgaaccactgccacctcagcctgggtgacacagtgagactccatctcaaaaacaaaacaaaaatcttgaaactgtctcaaaaaaaaaatcttgaaagaagacacagcggggttcttgaaagaagacacagagaaggctcaaggcttctctctgccttgctcaggagacctggtaccttagctggggctgcaggtgtggagctgagaatagcttggggggtggctgtttttgaaaggagggtgtctgtgcaaatatcacacccagaattttctcaagttgcgccttgcatcaagagtcccaaagtcctccccagccacccaaactcgtttttctcacttttggtgattattctgtgccccaaatagtgcaactgagcaatgaggtctgagaatgaggaatggacctcagccgccatcccctccccacctccagccgtggtttccgggcctcagagagacggggagaagtcgtcaagtggcagctgatgaaatttggggaagctgtggatttgggctctggatggtcagagaggaggcctctagctcctcaggacagtggttctgtagtcgcacgaagttgcccagagaaggtggcaggaggaatacattcgaaaaggagaaatcggtgcaggactaggggccagggaagaaaatgcagaaattctttgtaccgccaggtgaggtggcttacgcctgtaatcccacactttgggaggccaacacgggcggatcatgaggtcaggagttcgagaccagcctggccaacatggtgaaaccccgtctctactaaaaatacaaaaaaaaaaaaaattacctgggcgtggtggtaggcacctgtaatcccagctactcaggaggctcaggctggagaatcgcttgaacctgggaggtggaggttgcagtgagctgagaccgtaccactgcactctccagcctgggcaacagagcgagacttcatctcaaaaaaaaaaaaaaaaaaaaaaaaaaaaaaaaaaaaagccgggcacggtggctcacgcctgtaatcccagcactttgggaggccgaggcgggcggatcacgaggtcaggagatcaagaccatcctggctaacacggtgaaaccccatctctactaaaggtacaaaaaattagccaggtgtggtggcaggcgcctatagtcccagctacttgggaggctgaggcaggagaacgacatgaacccaggaggcggagcttgcggtgagccgagatcacgccactgcactccagcctgggcagcagtgcaagattccgtctcaaaaaaaaaaaaaaatcctttgtaccaggtggtaaagtgctcctgccctgagctccccttaaatgctgcctgccctcaccctggctcttcacaggtcccctgccctggcctccccaggatccagttctaaaggggtcacactagccactggactggccctcaggaccgcactgcaacactgctatgtgactagtcagtgccttatctggcctttccaggtgtgaaatatttgcaacatcacccaggtctgtggggcgggggcatctggctcagtagccccaagtctctatctggggtcacccagtggcctctccatgaacccctctgccctggcctggttgttggtccacccccaccctcagaccaccgtgttgccctccagaaacgtgggtgacgtgggcatgtgcatgcccctctccagggagctggagctgcggagtggcaggaggtggtggcccggggtcccgccccgcctccgtccttgcacccccacccccggcctccagcactgcagcggccgaagcacctcccgccgcaggtcccggctgcgccacgtgtagatgacggggttgagcagggaattcagggtggagacggcgaaaaagtagtgggctttgtagaggatcgggcaggagtggacgggacaggcatagtccagaaggaggatgctgaaggcgggcagccagcagacgataaagacgcctagcacgatggtgaccgtcttgagcagggctagcgtctgcggggcggccatgtcagcgtggcttgagcggaccacgcagtagatgcgcacgtacagggccacgatggccaacaggatgatggagaagatggtcaccacgcacagcacataatgcttggcgtagagaggcaggacagtggagcaggcctcgaggtggcccaggcagttccagccaaggatgggcaggccaccgaggaccagcgagatgagccacgaggccccgatgagcagaagcatgcggcagctcttgtcgctgccatacagcttgaccttggcaatggccacgtggcgctcaatggcgatggccaggaggctgaagacagaggccgagagcgtgatgaaggcagagccctcccgggcaaaccactgcacaggcgtcagcctcagcgtgacagagccagagagcaaggtattggctacgaaggccacgcctgccagtagatcggaggcggccaggttgcccagaaacaggtacattgccgagtggaacttgctgtttcgggccaccgcaatgagcaccagaaggttttccaccacaatggcgcaacagaggatgacgatgaaggccgaggccacctggcgggaggtcgtctcctgcgtttccagcgtctccttggtataattatagtgttcctggaccttgttggggttcaggtactccgagtacaagctgcccatggtggggctcagaggcctgctggggccatggggctttcagaactgcagagaagacagacagacagacagacaataggtcagagctgtggctgctacctgggctctggcctcggatgggctgagattcaatttcctgctctgttactcttcgaggaagggccacatgaattcagaatcatcatcatccccacttacagacgggaaacccagagagattaattcactttcctaaagtctcaaatttaaccagcggcagggccagagagactggctctgcggcctctataagccctaggctacgctctttcttatttattttatttatctatattttaaagacaaggtcttgctctgtcattcaggctggagtgcagtggcgcaatcatagctccctgcagccttgaactcctgggctcaagtgatcctcccacctcagcctcccacctcagcttcagctacaagcacatgccaccacgcctggctaattttttttttttttttttttttttgagatggagtctccctctgttgccaaggctggagtgctgcggcacggtcttggctcactgcaacctcctcctcctgggttcaagtgattctcctgcctcagcttcctgagtagctgggattacgggcacctgccaccaggcccagctaattttttttttatttttagtagagacagggtttcaccatgttggccagcatggtctcgaacttctgacctcatgatccgcctgcctcggcctctcaaagcgctgggattaccagtgtgagccaccgggcccagccgcctggctagtttttttgttttttagagattgggtctcactgtgttgtccaggctggtcctgaactcctggcttcaagcaattctcctcggcctctcaaagcaatgagattacaggtatgaaccatgacatcttgcctcttttaattttcattattattttctagagatagggtcttgctctgtcacccaggctggagtgcagtggcatgatcatagctcacagttgtctctactcctgggctcaagtgatcctcctgcctcagtctcctgagtagctacacgctttcaaagggaaagaagctcccccaaatggcatgaaaaatataatgtggacttccagaaaccttgcccacctacccagagagcaagccctaggcaggtcctggagggtttgtctcttttctggaacacacaggcgcctgcgccctcatgctgacctgggtcagggagagtctcaccactgatagctccgtgccctgctcattcattaccacccactaacgctggatttcaggctgggtctaagccttgaggccacgggtgctcccaagataaggtcttggggagacaccagggcggccctgagattcaaacatcccagaggtcacaccatcttcaaggacacagaccttgaaggcaatccagaatttgctcccattccacctctgaaacactgggcaagtccctagacgctgtctcagcctgaacctccttatctgtgcaatagagagaagaaagcccacttcatgggggtgatgggaaaatccttttaaatgacgcatgaggcacgtttagctcatagtaagcactcaacaaatactgccaaatgttattagctcccctctttcctccagtcctttgggaagggaagggatgtaagccaaccagacgagatctccaacagcctgttctcatcagcaccatctagctctgccctgggacagaaggtcctgccgggatgggcagggcgctggcaccccctccccagccaggatgaaatccagatgtgaggcccctggaacaaacagggtggagtcctcactctgcagtcacatccggtgtgaggaaggcgggatgtagggggagtcaggatgggagagaccccatctgggaggtcctggctgggaggatggggcagctttgctgaagtcatgtgagccgtgaaggggtgtgcagccccgccgggagggggtaaggcatttgttccatgaaaacctgagtcacccccccaaccccctcccatccctcccctccaccctcttccatccctccctctaccccctcccatccccccccatcgccacccaccaaggaaaactgagccgtggtgggagggggcggggagaggcgctcctcggcagagaggatgagaggcagacaccatggccttcccccagcttgggggtagggttaggggttgtcagaggcgccagtgcagtgtatgcctttcatgaagggagaggaagttccagccttagctaaatgggagggaggggggagagtagggggagtcctcctcaggtccctagaaacacgtctggcaaggactgtgtgcaccgttccagaaaagtctggttaggccagttctcctgagcccaggagtgatggaggtttccggagtcacccagccatctcagtccctggccgccccctccaaggggcatcctggcccctggctggatagaggcagctgctcccccagggcggagggacatccgtcctagtttgggaacagacaagggcttgtgcacgtccccggggactgctgcccctcccagatagccacacagaggccccttgttcccttgctggacgcagccccgggcatcttgatgccctctgcacgctgcagccagtcccaggcaggcttgggcccaggctgcggctggatcagacacagctgatgggccggaaacagcccatgctctgattggctcattttcaatccaagggcactgagcaatttgcctattggcccgggctttccatcttctgcctctgattggtccagttgggggcgctctacggccagccctaccgatggggtcctttataggcgacgggagctcaggctttctgaggatagagttaatgctatgtggacgtccctagggggagtttgaaccgcagcctgacctctgggtcaccccgaccagacacccccaggctgccctggcctgctgggcccctcctggggttcataagtgagaatcaaggtccctttccaggcctggggagcacgctgtgcagtgcagccgccccctctgctgctcaccaagagatttgctgtggcttcctggataaataagaaatgtgtttaggccgggcgcagtggctcatgcctgtaatcccagcactctgggaagccgaggcgggcctatcacctgagatcatgagttcaagaccagcctggccaacatggtaaaacccccctctactcaaaaaaaaaaaaaaaaaaaaaaaattagccgggcatggtggtgtgcgcctgtgatcccagctacttgggagactgaagcaggagaatcgcttgaacccgggaggcagaggttgcagtgagccaagatcgcagccattgcactccagcctgggtgacagagcgagactgtctcaaaacaaaacaaaacaaaacaaaacaaaatgaaatgtgttcagcccttgcaccccagggactaactaagcagtctgtctttttccctgagaggaagactgggggtgctgcactctcaccttctgcagcccggggaggctaaggcattcacagagggagaagcagctctcctagagaaggggaaactgaggcccacattctatccaagactcatcttaaccactaggactttactgaggcaagcacttgggcggttgacgcctcccagaaagaggaagcagggcactgaggttggagctggcagaagagtcaccccctaggtggatggcgtggcctagcccatgtcccctccctgtgtaaggttaccaggttttgagaaggacacagagcctgtctcccggtcaccttcaccaagtctgccctgactccctctcagaagctcagaaagaggccactgggctcacatagaatgtccaggcctgaaatggaacaggagggacaagtgatggggtttggaaggaagggaagagagatagactcagacgactgtttgtctggagattaggagaggggaaggatggaggaagcctcagtggcttccaaggtcctctccacccactcccagttccagaaaggcaggccctgtggttacagttccccctggtcacccatggagcccgtggtagccaccctaccttttggtttctctgtggttgtcaggaccccctaccctgccattctctaccaagcagccagggggagcttttaaacttgtaactccatgtcactccccaactccaaattcttccatggctccctatagcccaagtaggatggcccctgccgatgaagcctcctcccactcttcccccagggccattccactccaaccacactaaacctcctccatgctacccctacccctacctccaagcctttacccctgctgttcttcttggggcacactctttttctcaaaaaaaaaattttttttttttgagacagagtctcactctgttgcccaggctagagtgcagtggtgtgatctcggctcaccacaacctctgcctcctgagttcaagcgattctcctgcctcagcctcctgagtagctgggattataggtgcctaccaccacacctggctaatttttgtatttttagtagagatggggtttcaccatgttggccaggctggtctggaactcctgacttcaggtgattcacctgcctaagcctaggaaagtgctgggattacaggcgtgagccaccacgcctggcctttcctcaaatctttgaatgactgtctccccatctttcagaaaggcaggccctgtggttacagttccccctggtcacccatggagcccgtggtagccaccctaccttatagaaagtgacctttctatttaaaggtcacttcctcagaggggactcccctgacccccagtctacaatagcagccatctccaagccttttctaatcacagaatctcgttttattatctgcacagcgcttgccactatgggaaactatcatgatatctttccttttctgtctggcttccacctagacagtcaatgcctaaggccagggagcaagtcagttatcagcccctacagggatgcctggcacaaataaaacactcagaaaacgtgtggaatgggcaaatgaatgaatgaatgaatgaaccaatgaacaaaggagaccctagtgggttcccaagggtggaaactcctaagctcagcccagacccaaacagcaacaaaggagcctggagacacctctggtccgcgggcagcgcccccatcgcccaccatcaaccaggcaaagcccagcgtgtctccatggagatggcagcaggacccgaccccgtgctggcccgcactctcggcctccttatctggtttaggaatgcgcggtatccacgctcgctcgcgcgggagccacgcctcctctcccccccgcccccgagaccgccacacgcgcggggcccccacgtctccaagcggcactggaaggattcctctccgtcccgccaggggtcccgcctcgagattctgggaagactgggggtgggggaccagatcgcagcagcagctgcaccgcgagttccgcgcctggccgtgtcgccccacgagggggactgtgggctcagcgcgtggggcccggagcatctgacaaggacagagacagaggagggggtggaaatccccgggtgagtcaacccgtgcctgagaagggggcgagttccgacgctccgcccggctcggggccacgcgaggtccgcgccacgcgcgccttcacccacgacccatccctgagccggagttgaaagaggaggcgtctgagccacgcagtcactttctctttccttacaaaacaaagccacgccccccgccgggggaccggaggaggcaaacaacttggggaaaccgaggcagaaagcccgacgtccgaccgccctccccgtgggtgccgccccttggcttggaggctccacggcgcgcacatccttttgccctcgctcagccggagtcagccaggaggggtgttgcccccccccaaacacactccccaagaccccggtccccgagcacggcgtcctgcctcccaaagactccagtcgaaagcgctcggattcagccttctccccggcgccaacttcctgccgctgagaaaggcggggagcacagtctgcgggttcgcggccgaggcagtgggggccgcccggattcttggagagggcgcactgtgaccacccgctccgtgcagcaggaacccaggcggcgcgtgcgcgccccagccccccgattggggcccctcagctcggatcccgagacctcaggggaccaggcccgccttttctgcctccttgtcgccacgcgcgctcacctggctaggccggcccggctcccggccctggccggaggggccttggcgtctgcgtccccagggcggccgcggctggggctggggttgccagccgggctcggctaagtcccggggctgggacgagggacagaggggggggcggagagccgccgcctctgccccccgctcgccccgccctcctctcctcccctttccggcggcggctgcaatgaattccagatgtgaccggccggctggccggggcgcacgcgggggccgacaggagctgcacggagggccctttgtccgccccccccacccgatctctcactctgcccctcccagcccccacccgtgagaaccggccggcgcgaaacgtcacgcagcctggtgacgtcacagtactcctggccaggtggcctcaacctgaaacaactgtcttcaaccccaggttacctctgggcttacccctgggaccctggacttggaagaaaacacgaggtcacatttattgactcaacaaagagccttggaagtacctactaggtgtcaacgcagcaaataggcattaagtgcctactgtgtgtccacccaacaaataaattcctactaagtgcgatgtcctgtcccaaagacaaaattgatctctttttttttttctttttttgagacatggtcttgctctgtcatccaggccagagtgtggtggctcaatcatagctcacgggagcctcagcctcctgcctcagcctccagagtagctgggactacaggtgcgccatcatgcctggctaattttttgcagttttttgtagagatggggtctcgctgtgttgcccaggctggtcttgaactgctgcattcaagcaatcctactgcctcagcctcccaaagtgctggaatgacaggcgtgagccactgtgcctgaccagtctctcccttgataggacctccagaattcaggtgctgccctgtttcccttgggggactggggacactccacactctttcctgcctctgtagatcactgtcccctctggcggggcccagtttgtgcctgccttccagcgtcgggcccagtcttctatccagatttccaattttcactaattcctgggcatttctgtgtgcctgcctgcggaaatgatggacactacaccttcatcgaatgatgtgtgtgtgtgtgtgtgtgtgtgtgtgtgtgtgtgtgtgtgtaaccagcagttcgacaacaggataggaaagcccctcattccagcaacaaaatttttttgtttgagacagagtcttcctttatctcccaggctggggtgcagtggtgccatctcagctcactgcaacctctgcctcccaggttcaagctattcctgtgcctcagcttcacaagtagctggaaatacaggcgcgtgccaccacgcctggctgatttttttgtatttttagtaaagacagggtttcaccatgttggccaggctggtctcgaactcgtgacctcaagtgatccgcctgcctcggcctccccaagtgctgggattacaaatgtaaaccacagcacctggcaacaaatattttttatgcacctactgggcacagcagtgaacaacaacaacagcaacaaaaaggaaaaactccttgaccagatggatttttttttttttttgagacagagtctagctctgtcgccaggctggaatgtagtggcactatctcggctcactgcaacctctgcctcccgggttcaagcgattcttctgcctcagcctcctgagtagctgggattacaggcatgcgccaccatgcccagctaatttttgtagttttagtagagatggaggtttcaccatgttggccaggatggtttcgatctcctgacctcatgatctgcccgccttggcctcccaaagtgctgggattacaggcatgaacaaccgtgcctggccaacccagtggatcttatgttcaggtgggaaatatggctttttatgagggtaccatttgtgaaaatgtagacattatatgttataaacataatctggccaggcacggtggctcacgactgtaatcccaacagtttgggaagccaaggtgggtggattgcttgaccctaggagttctagattagcctgggcaacatggtgtaactccatctctacaaaaaatataaaaattggctgggcatggtggctcacgcctgtaatcccagcactctaggactccaaggtgggtggatcacttgaggtcaggagttcgagaccagtctggccaatatggcaaaaccctttctttactaaaaatacaaaaaattagccgggcgtggtggcgggcgcctgtaatcccagctactcgggaggctgagttaggagaatcgcttgaacccggggaggcgggcgttgcagtgagccaacatggtgctattggacttcagcctgggcaacagagcaagactccgtctcaaaaaataaaataaaaataaagaggctgggtgcaatggctcacacctgtaaccccagcactttgggaggcaaaggcaggtggatcacctgaggtcaggagttcaagaccaggctggccaacatggcgaaccccatctgtactaaaagtacaaaaattagccgggaatggtagtgtgtgcctggagtcccagctactcgggaggctaaggcaggagaattgcttgaaccctggaggtagaggttccagtgagccgagatcatgccattgcactccagcctgggtgacacagcaatactccattttaaataaataaataaataaaactaaataaataaatggagtagtcttgtgtgtactgatgggaaatggtcttcaacatattaagttgaaaaagtacagtgtagaccagtatgcattgcatttctgggtgtatttataagaactatataaatacacacacatttgcctgtgacacacagtctgtctctgggagaaggcaccagaccctagtcacaacagttactcttagggagaggaaccagggggcagggaaacgaggtaagaagaaacagcttttcatggtataccctggagggctgtttgaaatcttttttttttttttttttttttttttgagacgaggtatctccatattggccaggctggtctcgaattcctgacctcaggtgatccgcctgcctcagcctcccaaagtgctgggattacaggcataagccactgcgcccagcctgctgtttgaaatctttagcttctattaccaattcaaaaaaatgtacaaagaggtcgaggcaaggggatcacctgaattcagcagttcgagactagcctgaccaatatggtgaaaccccatctctattaaaaataccaaaattattgggaggctgaggcaggcagatcacgaggtcaggagttcaagaccagtctggccaacatggtgaaacccggtgtctattaaaaatacaaaaattagctgggcacagtggtgcacacctgtagtcccaactacttgggaggctgaggcagtagaatcacttgaacccaggaggcggaggttgcactgagccgagatcccgccactgcattccagcctgggcaacagagtgagactgcatctcaaaaaaacaaaaaaacaaacaaaaaaaaacacaaaaaactagccaggcgtggtagcaggtgcctgtagtcacagccactctggaggctggggcaggagaactgcttgaacccgggaggtggaggttgcagtgagccaagatcgtgccactgcactccagcctaggcgacagagtgaaactccatctcaaaaaatatattaaaaattttaaaaaattggtcatggatagtggctcatgtctgtaatcccagcactttgagaggccaaggtgggaagaccagttgtgcccaggagcttgagatcagcctgcgcaatatagtgagacttcgtctctacaaaagaaaaaacaaaaaattaaacattagccaagcatggttgtgtgtgcctgtagttccagctactcatgaggctggggtgggaggatcacttgagcctgagaggtggaggttgaagttagctgaaatcacactgctgcactccagcctagttgacagagcaagacactgtctggaaaaaaaaaaaatcaacaggccaagcacgataactcacaactgtaatcctagcactttgggaggcagaggcgggaggattgcttgaggccaggaatctgagaccagcccaggcaatatagtaagagcccatctcaaaaaaaaaaaaaaaatcaacacgttaatgctacatataggcatgcaatatatgtgtgtatgtaacacaacatgtaatgctctgtgctaagcctggtgatgcctaattggttgctgccatccaaagctgacagtctgatggaggagacagagaagaaaccagacaattatttttatttatttatttatttatttatttattttgagacagagtctcgctctgtcgccaaggctggagtgcactggcaagatctcggctcgctgcaacctccacctcccaggttcaagcaattctcctgcctcagcctcccaagtatctgggattacaggcgcacaccaccacacccggctaatttttgtattttcagtagagatggggtttcaccatgttggccaggctggtcttgaactcctgacttcaggcgatccacctgcctcagcctcccaaagtgctgggattataggcgtgagccaccgtgcccggccgaaaccagacaattctaacacagggtgatggggctttgaaggggggatacaaagaaagtcagaaagtgactagtcaattctacactttgccccttttcctgagctcgatttcagggtctgctgggttctgggccagatcttggggcgcacttggaccttggcaaaacctcactgcctcttctaccaagtgagaagtgttgcctggacactctagaaaccaggtgtttaatccgcagaggaggaagcacgaagaaaattaggttttctcctcgtctgagagctatcagagcggaaatctcagtcttgtgtggggacctgaaggctggggaggaagtgaccgccctcatatgcctgggctggctcagcaatttgcagtctctcctgggacctggggggttggggcagaggggtgatgtcaaggctgcagacatatgtggccgtctgccaggggaaccgtggctcccagacaaaggtgatgtccccggggacacacagacacaccgacatgcaacttccgcctccctcccacttctgaggcaacacaatgtcttcgccaggtcagccaagggagcgctacagaggactggaaaacgctggaggcctggacttcctgatggtcttggtgggggtcaggaggagagcttggcctaccccggtggcggggggcggggggctgagtgagagaacagtggaggaggaaggaaacagggcccttttcttggagaactcccagcaggggaaatagaggagaaggaagaggcttgaactagcttccactaattatagggtcagtgacaataatggctaacactcacagccaccgactgtgtgctagatgtggcgctgtgagtcctcacaacccgaggaagtgggtattatgataatcatcatcttttttttttttttttttgagatggagtctcgctctgtcactcaggctggagggcagtggcgcgatctcagctcactgcaacctccgccttccaggttcaagggattcccctgcctcagcctcccgagtagctgggattacaggcgcccgccaccacacctgggtaattttttgtatttttagtagaaacggggtttcactgtgttagccaggctggtctagaactcctgacctaagctgatctgcccacctcggcctcccaaagtgctgggattacaggcgtgagccaccgtgcctggccttttttttttttttttttttttgagatggagtctcgttctgtctcccaggctggagtggcagtggcatgatcttggctcactgcaacctccgcctcctgggttcaagcgattctcctgcctcagcctcccaagtagctgggattataggcccgcgccaccatgcctggctaatctttatatttttagtggagacagggcttcaccatgttggccaggctgatctcaaactcctgacctgaagtaatccattccatgtaccttggtcttggcctcccaaagtggctcacactcttacaggtgtgagccactgtgcccggccaatcccattttaaagaagaggaaaattgaccaggcgcggtggctcacgcctgtaatcccagcactttgggagatcaaggtaggcggatcacctgagatcaggagttagagaccagtctggccgacatggcgaaaccccatctctactaaaaagataaaaattagccaggtatggtgatgcgcacctgtaaccccagctactcgagaggctgaggcacaagaattgcttgcacccgggaggcggaggttgcagtgagccaagatcatgccattgcactccagcctaggtgacagagcgagactctatctcaaaaaaaaaaaaaaaaaaaaaaagaaggaggaaaattgaggcatacaggagaggtgagattcgaactagagccatccggctcctctcaatccagcagccctggctgtctgtcttcttattcattcggagtctccaccccattcctgtgccaccacccccatctctgccccagcaggtaggaacagacaggcagtggttaccagccaggactacattggtcaacagtgagatgtggaatgttctccataatccaggagaagggacgccctctgacccccattcctaccttcaccccggatattgtgaactcccccaaatccaggaggcccaggcccttcacaccagatcctgtggttgcccaccatggccctgaaatccatgagacgcaggcctgttctccatcctccctgggcctccactgtccccccacccccctggctctcgtctctggcaggaggaactgcctgggaagtgtctgagatggatcccaactttctcatcatcgccccagcgctgggggaaggggccccaggctacagagaagcttcccagatgctgatcttggcaggcatcagggaactgcggcagcctcatctcctccatgggctcagggcccactttcagcttcagtgacggggtggggaggctcccactggaggccagcctctgccacatctgcaccagaagcagtcttggcccttcgagctggggaaggggtgggctctcttcccgccaaaagcaggatgaacaattaggggaaaggggaacctcaaaaaggctaacttctcagcaagcccctcccaccccagcatgctcatgacagctgacatgtgtataacgtgccagttactgccctaagtgttttacaaatattgactcactctcaatagctcacagcagctccctcagctagagaaaggagagataaactgcagtccatcctcacaatggaagaccatgcctgtaatctcagcactttgggaggctgaggcgggcggatcgcctgaggtcaggagttcgagactagcctggacaacatggcgaaaccccatctctactaaaaacgaaaaaattagctgagtttggtggtacgcacctgtaatcccagctactcaggaggctgaggcaggagaattgcttgaacccaggaggtggaggttgcagtgagccgagattgcaccattgcactccagactaggtgacaagaacaaatgaaactccatctcaaaaaaaaaaaaaatcaaaaagaaggaattggtgatacctagccacatggagaactctcaaatgtattaggatgagggaaagaagttcaacgcaaaggttgcatattgtatgactctatttctataatgttctaggagaaaaaaaactatagggacggtgaaatattgggacaggagaggttgactgcaaaagggcacggtgggaccgggtacagtggctcacccctgtaatcccagcactttcagaggctgaggtgagagaattgctggaacccaggagttcgacaccatcctgagcgacagagcgagacccagtctctacaaaaaaaaaaaaaaaaaaatgagtcaggtacagtggcacgtgcctgtactagctattccggaggctgaggcaggaggattgcctgagcccagcagtttgacaccactgtcacctatgatcgcaccactgcactccagcctgagcaacagagtaagaccaatgtcttaaaaaaaaaaaaaaagttggggggcatggggggaatttttttttttttggcgatggaaccattctgcatcttgattgtggttttggttacgtgactatatatgtttcttgaaatgtgaacaactgtatgcaaaaaagggaagattttctttcttttgagacagagtcttgctctgtcgcccaggctagtatgcagtggcgcgatccactgcaacctctgcctcctgggttcaagcgattctcctgcctcaccttacaggtgtccaccaccacgcctggctaatttttgtatttttagtagagatggggtgttaccatcttggccaggctggtctcgaactcctgaccttgtgattcacccgcctcggcctcctaaagtgctgggattacaggcgtgagccaccacgcccggccaggaagatttttattgtatctaaattgtgcaaaaaaagcaatacttttgtttaaaaaattctcacagcagccttattatttgtgtgtttgtttatttgttttcttgatcttagccaaaaggccgagaagcgatttatttatttttattttttatctttttttttttttttttcgagacggaatctggctctgtcgcccaggctggagtgcagtggcgcaatcttggctcactgcaagctccgcctcccaggttcacgccattctcctacctcagcctcccgagtagctgggactacaggcacccgccagtacgccgggctaattttttgtatttttagtagagacggggtttcaccgtgttagccaggatggtcttgatctcctgacctcgtgatccacccgcctcggcctcccaaagtgctgggataacaggcgtgagccaccgtgcccggcctagtttttatctttttagagataaggtcttgctctgtcacccaggctggagtgcagtggcgcaatcatagctcactgtagtctcaagctggtgagttcaagcaatctgcctacttcagcctacccagtagctgggactacaggcccaagacaccaagcccagctaacttttacattttttgtagagggttaggttggtctcactatgttgcccaggctggacctgaactcctgggctcaagcgatcctcccaccttggtctcccaagggcactgagattacaagagtgaaccactctgcctggcctccggacagtagctttacatcagtgagggtctaatcaggaaaacagaagtatctccaatagaggggatttaatatatgggtcaatttaatacgtagataaaaaatcaaacgatggccaggcgcggtgtctcatgcctgtaatcccagcactttgggaggctaaggtggacaaatcacgaggtcaggagttcgagaccagcctggccaacatggtgaaacccggtctctactaaaaatacaaaaaattagctgggcatagtggcaggagcctgtaatcccagctacttgggaggctgaggcaggagaatcgcttgaacccgggaggcggaggttgcagtgagcggagattgcaccactgcactccagcctgggtgaaagagtaagactttgtctaaaacaaaacaaaacaaaacaaaatggatggagagattattttaaaattagcataggccgggcacagtggctcatgcctgtaatcccagcactttggaaggccgaggcgggcggatcacctgaggtcgggaattcgagaccaggctgaccaacatggagaaaccgtgtctctactaaaaatacaaaattagcctgatgtggctgggcgcagtggctcatgcctgtaatcccagcactctgggaggccaaggcaggtggatcatgaggtcaggagatcgagaccatcctggctaacacggtgaaacccgtcactactaaaaatacaaagaattagccgggcgtggtggcaggcacctgtagtcccagctactcggaaggctgaggcaggagaatggcgtgaacccgggaggcggagcttgcagtgagccgagatcacaccactgcactccagcctgggcgacagagtgagactccgtctcaaaaaaaaaaaaaaaaaaaaagtagccgggcatgctggcacatgcctgtgatcccagctactagggaggctgaggcaggagaatcgcttgaacccaggaggcggaggctgcggtgagccgagatcgcaccattgcactctagcctgggcaataagagcgaaactccatctcaaaaaaaaaaaaaaaaattagcataaaccaagcatggtggtgtaggcctgtagtcccagccactcgggaggctgaggcaggaggatcacttgagcccaggagttggactccggcctgggcaacatagccaaacctcatctcttaaaaaatataataaaaataaaggatatggcagaccatgtaaaaaatttaaatagaaattaccatataggaagatgatatctaatgggaggtgctaccagaggcatatggggagaaatatcttgggctgggtgcagtggttcatgactgtaatcccagcactttgagaggccaaggtgggaggatcacttgaagccaggggtttgagaccagcctgggtaatataggagacccccatctctattttaaaaatctttaaaaaaaaaatccatgtatggttgcacgcacctgtggttccagctactcaggaggttgaggcagaaggatcacgtcagcccaggaggtcgaggctgcagtgagctatgattgtgccactgcactacagcctgggtgacagagtaagaccctatccctagaaaaaaagcaaaaagaggccgggtgcggtgactcacgcttgtaatcccagcactttgggcggctgaggcaggtgaatcacctgaggtcaggagttcaagaccagtctgaccaacatggtgaaaccccgtctctactaaaaataccaaattagccgggcatggtggtgcgtgcctgtaatcccagctacttgggaggctgaggcgggagaatcacttgaacccaggaggtggaggttgcagtgagctgagatcgtgccattgcactccagcctgggcgacaagagcgaaactccgtctcaaaaaagaaaagaagagaaaagaaatatcttggcttctcctaccttcctctcggaaaatctgcccccagtgcctcccattggctaaatgtggccagaagccagttggcaggggagatgtcccgtgcagaggtcagccccgagccatgcagggagaacagcacagggactagatgatgccagggctcgcaggcttaagccctgcaagaaccatgtgggtaggggcaactatacccccattttacagaggaggaaactgaggcctggagagccaatgtgacatgcccagggtctcaggccctcaaggaggttggactctctggttctcgccaacacctgcctggagggctagttctgtggctttttttctacccttcacgcctgtcctggttgctcagggaactgtagggaatgaaaatatccatgcaaatcagccccactgcggggaggccctccgtgggaggctttgccccctcacggagcttggcagttacacacaagctgagctgaaaacaaacaaacagcagatgtttggacagttgatgggggaggggcgctttaggcagctctccctagtataggagaccacccctcaccccccaccaacagatctgtgtcatccatccatgccctgtactttttttttttttttttttgagatggagtcttgctctgtcacccaggctgaagtgcagtggcgcaatcttggctcactgcaacctctgcctcccgggctcaagcaattctcgtcactcagcctcctgagtagctggaattacaggcgcccgccaccatgccgggctaatttttgtatttttagtagagacggggtttcatcatgttggtcaggttggtctcaaactcctgaccttaaatgatccaccctcctcggcttcccaaagtgctgattacaggcgtgagccattacacccagccaatcccattttaaagatgaagaaaattgactgggtgaggtggctcaagcctgtaatccctacattttgggaggctgagttgggcggatcactttagccaccgacctcatgctctgtaccttctttttggggggctgccccccagtattgcaggcctgacccctggcctttgtgagaacccttgttcagtaatggaggaaaagctgaggccagatgttgaggggccttcccgcatctgatatgtgccccctaaattggtgtgatacccacagccagcaaagaccctctctggattacagggttgatgctggtcccacactaccaaggacagaggtcacctgcaattgagcctttgatccacaggagagggctggttgcattggcctttgacctctccccaggcttggctcaaaatggtcaaactttgagccttttggtgtgaaggtcccctggtcgttactgcccttttattaagactcataactgggggccggacgcggtggctcacgcttgtaatcccagcactttgggaggccaaggcgggcagatcacttgaggccaggtgtttgagaccagcctggacaacatggtgaaaccgtgtctctactaaaaatacaaaaaggcagggtgcagtggctcacgcctgtaatctcagcactttgggaggctgaggcaggcggatcacgaggtcaagagatcgataccatcctggccaacatggtgaaacctcgtctctactaaaaatacgaaaattagctgggcgtggtggcgtgtgtctgtagtcccagctgctcaggagactgaggtaggagaatcacttgaacccaggaggcggaggttgcagtgagcagagatcatgccattgcactccagcctggacaacaagagtgaaactccgtctcaaaaaaaaaaaaaaagactcataatcaatatgccagttggggaatgctgtgtaaactggggtagggaccaggtgcagtggctcatgcctgtaattccagcactttgggaagccgaggctggaggacagcttgaggccaggaatttgagaccagcctggccagcacagtgggtctctgtctctaccaaaaataaaacaagtcagcccagtgtggtggcatgtgcctgtagtcccagctactcaggaggctgagtgtgaggatggcttgagcccaggaggtaaagcttgcaatgacctatgatcctgccactgcactccagcctgggcgacagacggagactctgcctctaaaagataaaaaataaaagctggagtaggaagggaaggataagtttagatgcattgtcacctaagaaggtggcatttcagtaaagagccaaaggagatgaaagagtgagacatacagatattcaggggaggctgggcatggtgtctgaagcttgtaatcccagaattttgagaggctaaagtggtgaatcactagaggccaggagttggagaccagcctgggcagcatagtgagactccatcatgttttgttttgttttgttttgttttgttctgttttatttgagacagtgtctcactgtcacccaggctggaatgcagtggcataatcacagctcactacaacctccgcctcccaggttcaaacaattctcctgcctcagcctcccaagtagctgggattataggcgcctgccaccacacctggctaatttttgtatttttagagagacaaggtttcaccacgttggccaggctggcctcgaactcctgacctcaagtcatctgcccacctcggcctctctaagtgctgggattacaggtgtgagccaccacgcctggccctcagcatgttttttaaaagaataaaataataaaagaaacaaaaatagatattaacggggaaatggaatgtgattggtgggttctgggttctggtgaggaggccagggcggctaaagccatggaggaaggggaacaggagaatggaaggttagggcaggtcctgcggggacttgagggttgcatgaggactttggttttagtgctaagtgaaatgaaggcactgagggttctaagcagaagagggaagtgacctgactcagatgtttacagcctacctctaggggatgggtaacagatgatgaggagtgagggtggaaggaagaattcattctcaacacagccccgtaggggagggtttgtgtgtatttcacttacagattaggaggccacagctcccacttgcccaaggccatccagccaattagtggcagtgcctggattcaaaccagtgttactgaatgaataatcatgtatgggcaccttacgtgcccagtgacctcaggtggacagagatttgagacccagggacatagggagaaagtcctctgttgttagcaatacccctgcaacaggatgaacaaaggaattcactcaggaaacatttattagctgggtgtggtggtgcatgcctgtggtcccagctactcgggaggctgaggcaggaggattacttgagcccgggagttgcaggctgcagtgaactatgatcatgccactgcactccagcctaagtgacagagtgagactctgtctctaaaaagaaaaacaaaagaactaaagaaacatttattgagcatgtactgtggtccagacactatgctgagtgctgaagctacagcaggtaataggatagaggaaaattccagccttgggtgagtttacattctaatgggagaggcagacaaaaagcatttttagccaggtgcagtggctcacgcctgtaatcccagcactttgggaggccgaggtgggcagatcacaaggtcaggagtttgagaccagcctggccaacatggtgaaaccccatctctattcaaaatacaaaaaaattagccgagtgtggtggcaggcgcctgtaatcccagctacttgggaggctaaggcaggagaatcgcttgaacctgggagatggaggttgcagtaagctgagactgtgccattgcactctagcctgggcaacaagagcaaaactctgtctcaaaaaaaaaaaaaaaagaagaagaagaagataaccattaggccagatgtggtggctaacatctgtaatcccagcactttgggaggctaaggcaggagaactgctggagccgaggagtctaagactagcctgggcaatgtggtgagacctcgtgtctacaaatatatatatatttttaaatagccaggtgtggtagcacacacgtgtagtcccagctactcaaaagaccaaggtgggaggatcacttgagccccagagacagaggttgcagtgaaccaagatctcgacattgcactccagcctgggtggcagagtggaacactgtctcaaaaaaaagaagataaatattaatatagggcaagagaagagggtcagaaaggtcagaggtgaagatttgcttttttatttttttgagacaaagtctcgatctgtcacctgggctggagtgcagtggcgcaatctcagctcactgcaacctccgcctcccgggttcaagtgatcctcccatcttagcctcctgagaagctgggactacagtcgcacaccagcacagaggtttcagtgagctgaaatcacaccactgcactccagcctgggtgacagagtgagaccctgtctcaaacaacaacaacaaaaacaaaggaagcatgcagtgggtagtccgaaaggttcagccacctctgccccctgtcagtctttcctcactcctggcctctgcgactgctgttctctcaacctgaaacagactttctcctctggacaaagtcctcaagccttagctctcaggctacagcttcataagaccaccccaagaccctgcccccgtggttgggaattcctcctgtggacgcccacagaccctgtagactcccctcctgaactctgatccttcaggcctctgcattggactgtgaatatttcaaaagtgtttgctggatttactggtgtaccagtggtgcacagtaggtgcctaataaatcactaagaaactaagccaggcggcctagtgtggtggctcacgcctgtaatcccagcactttgggaggctgaggcaggcggatcatttgaggtcaggagttcgagaccagcctggccaatatggcaaaaccccatctctactaaaaatacaaaaattagctgggcgtggtggtgtctgcctgtaatcccagctactcaggaggttgaggcaggagaattacttgaacccaggaggtggaggaggttacagtgagccgggatcgcaccactgcattctagcctgggtgacagaatgagactgtgtctcaaaaaaaaaaaaaaaaaacaaaaggcacagggcatggatggatgatacagatctgttgtgggggatgaggggtggaatcacaaggtcaggagtttgagaccatcctggctaacatggtgaaaccgtctctactaaaaatacaaaaattagccaggcgtggtggcgggcacctgtagtcccagctactcaggaggctgaggtgggagaatggcgtgaacctgggaggcggagcttgcagtgagccaagatcacgccactgcactccagcctgggcgacagagcgagactccgtctcaaaaaaaaaaaaaaaaaaaaaaaagccaggcgaggtgactcacacccataatcgcagcactttgggaggccaaggcgggcagatcgcttgagcccagaagtttgagatctgcctgggcaacacggcgagaccctgtctctatgaaacaagaaaaaagaaagaaacgaaatactgttccatcatttgccacataaaatctaaactctctggtgcagaacagacttgcaaatctgcctgtaaaatcatacaccggattttggagtagacacacaggaggctgattgtagtggtggcttctgggagaagaactggggggtagggggcacagataagagtagacagaattttcactctagtaatctttgtaatttttgaaattctctctaccaggtgtatgaatgaccaatgaaaatatacaataggccaggcgcagtggctcacgcctataatcccagcactttgggaggctgaggcgggtggatcacatgaggtcaggagtccgaggccagcctgaccaacatggtgaaaccttgtctctacgaaaaatacaaacattagtcaggtagggagcatcacttgagaacaggagttcaagaccagcctggacaacaaagcaagacctctgcctctacaaaaaaaaaaaaaaaaaaaaaaaattgctgggcatggtggaacatgcctgtggcctcagctacttaggtggctgcagcagaggatcatctgaggccaggaattcaagactacagtgaactataatcgttacactgcactacagactggtaacagggtgagatcctgtctcaaaaacaacagcaacaaaataaacgattaaaagaccttttaaagttgcaaaatacatagagtcttaaacatgcatccacagttatttatttatttatttagaaacggagtttcactcttgttgcccaggctggagtgcaatggtgcggtatcagctcactgcaacctccgcctcccaagttaaaggaattctgcctcagccttccaagtagctggaattacaggcatgcgccaccatgctcggctaattttgtatttttagtaaagatggggttttggcatattggccaggatggtttcgaacccctgacctcaggtgatccacccgcctcggactcccaaagtgctaggattataggcatgagccaccacgcccggccgcattcagttattcttgcagggataaaatacacaatgaaatacactatactttttgttttctttctttcttttttttttttttttttgagacagagtctcactcgtcgcatgggctggagtgcggtgcgggatctcggctcactgcaacctctgcctcctgggttgaagcgattctcctgcgtcagcctcccgagtagctgggattacaggtgcccgccactacgcccagctaatttttttgtatttttagtagagataaggtttcaccatgttggccaggctggtctcgaactcctgactcgtgattcgcccaccttggcctcccaaagtgctgggattacaggcgtgagccaccgcacccggccacatttttttttttttttttttgagacaggatcttagtctgtcacccaggctggagtacagtggcatgaacatggctcactgcagcctcaatctcttgggttcaggtgatccttctgccttagcctccccattagctgggaccacaggcatataccatcacacctagctaatttttaaatttttggtagaggccaggcgcggtggctcacgcctgtaatcccagcactttgggaggccgagtcgggtggatcacctgaggtcgggagttcgagaccagcctggccaaaatggtgaaaccctgtctctactaaaaataaaaaataaaaataaaaattagctgggcgtagtggcgggcgcctgtaatcccagctactcgggaggctgaggcaggagaatcgcttgaacccaggaggcagaggttgcagtgagccaagatcgcgctactgcactccagcctgggcaacagagtgagattctgtctcaaaaaaaaaataataataatgctatttattgactttacaccttgtaccaggcatgggaagctttgcctccattacgtcactgaatctcataacctccttttccagcagaggaaaatgaggttggttcacagaccacgttgtcagctgtgctctgtccagaacgcactggcctccaagtagacagccctggactggtagggaagccggctatgatccggtggcgccccctggaggtctatcgggaacatggtaaagaacctaaaaatgggtgggccacagtagctcatgcctgtaatcccagcactttgggggaccaatgcgggagaattgcttgagcccaggagttcaagaccagcctgggcaacattgggagacccaccccccgccatctctacaaaaaaaaaattaggccgggcgcggtggctcaggcctgtaatcccagcactttgggaggccgaggcgggtggatcacctgaggtcaggagttcaagaccagcctggccaacgtggtgccacactgtctctaataaaaacacgaaaattagggccgggctcggtggctcacgcctgtaatcccagcactttgggaagccgaggcgggcggatcacgaggtcaggagattgagaccatcctggctaacacggtgaaaccccctctctactaaaaatacaaaaagttagccaggtgtggtggcgggcgcctgtagtcccagctactcggtaagctgaggcagggaatcgcttgaacccgggaggccgagatgtgcgatctcacaccactgcactccggcctgggcgacagagcgatactccatctcaaaatacaaatacaaaataaaaaaatacaatacaaaaatgagccgggcttgcgtacctgtagaccagctactcaggagacagaggcaggagaatcccttgagctctggaggtcgaggctgcagtaagccatgatcttgcccattgcactccagcctgggcgacagaggaagaccttgtctctaaaaaccaaaacaaagaaactaaaaataagcattcggatttgttagggggcgacaagggaggcactccaggatctgtggactccccactttgttctgtccttggagagccctggaaggtctgagaggggacgggacctggtttaagggggtaggggagaggaccctggtctagggggtaagggacacaaatacctaatctgaggggtttcggggggacatggccctgccctggggaatctaaactgggaggcatggtctggcaggcccaatcctgaaggctttctgagggcaataaggccctgcctttaaacaaatgaaaaaacgccaggcacggtggctcacgcctgtaatcccagcactttggaaggctgaggcgggaggatcacgaggtcaggagatcgagaccatcctggctaacgcggtgatacccgtctctactaaaaatacaaaaaattagccaggcgtggtggcgggcgcctgcagtcccagctactcgggaggctgaggcaggagaatggcgtgaacccaggaggcggagcttgcagtgagccgagatcgcgccactgcactccagcctgggcaacagagcaagactccgtctcaaaaaaaacaaaaacaaaaacaaaaacaaaaacaaaaaaacaaataaaaaaacaaaaccacataactggataaagaaaaaaccatctccgacagccttggaggcgggatgaaggcgtggcccggtgggcgtgaccaacagcaaaagtttaagcgttattggctgtattccttagttgctcactccagaactgcccacttatgggcgggggtcactccttcaggcttaacagtcattggctgaattgggccagagaggtctcattggctgaattcctgcaccggctcgtcggaggcgggacccaaagtaggctaggcctacggaagctgggtcttcttgctgtgaggtcgcgttccccagtgttacggagggtccttgaggcaggagtgaaaattgggtctgggggttagtcctggggtggaggtctgggcacgccgggtcggaccccctccatcttcggttttgcacaccccgctttccagcgcggagtcgcggcgggtagggcggcgtcgcgtgcgtgacgtcatccagcggcgcctcgcgaggctccagtggccttgacctcccgcggcgtgggaggctgcgcggcgatgctgcagttcgtccgggccggggcgcgggcctggcttcggcctaccggcagccaggtgaggccaggggctggaggcgtggtcgaaggatgaaatttgggggtgtccaggggtcgtctctcactttcgcccaacccttgcagggcctgagttccctggcggaagaggcagcgcgtgcgaccgagaacccggagcaggtggcgagcgagggtaaggcaaccggggtggctccaggaggggcggcgacagagaggtctgacccttgaccctaacctctgacccccgcaatcgctccaggtctcccggagcccgtgctgcgcaaagtcgagctcccggtacccactcatcgacgcccagtgcaggcctgggtcgagtccttgcggggcttcgagcaggagcgcgtgggcctggccgacctgcaccccgatgttttcgccaccgcgcccaggtgagcgagggctgtaatggtgaactgagtggcagagggatgaagagcgggatttcaggagtcacgatgactttgggcttgtacccttgggaaagtgctgtatttctacagcctccgtttctccacctgtcaaaggggaatgatgacagtttcccctgctgtagcgctgtgtgagattgaagcctgagaggtgacatcatctaagggttagggagacagaattctggagcccgactgattaggttcaaatcctgccttcccctcttgtccctcagtgtccctattttgtcagcggtcgggaggttgctgtgatgaataaatgacttaattctggcacataataagttctatagaaatgttgataatctttgttaactggtttttgcaaataagagcactaaaaagactaaaccattcctcggtgcctggaagaggctgtttgcattttagttaccctgctgttcataacatctctaagaaaatgtaggggccaccctgggcgcagtggctcacgcctgtaatcccagcactttgggaggccaaggcgggcggatcacgaggtcaggagatcgagaccatcctggctaacatggtgaaaccccgtctctactaaaaatacaaaaaaaaattagccgggcgtggtggcgggcgtctgtagtcccaggtactctggaggctgaggcaagagaatggcgtgaacccgggaggcggagcttgcagtgagccgagatcgcgccactgcactccatcctgggcaacactctgtctcaaaaaaaaaaaaaaaaaagaaagaaaagaaaatgtaggggccagttactgtggctcacatctgtaatcccagcacattgggaggccgaggtgggcggatcacttgaaaccaggagttgcagaccagcctggccaacatgatgaaaccccgtctctaccaaaaatacaaaaattagccggacgtcttagtgcaagcctgtagtcccagctactcaggaggctgaggcatgagaatcgcttgcacctggggagatggaggttgcagtgagccgtgattatactactgcactccagcctgggcgacagagacagactccatctcaaaaaaaaaaacaggtgaaattgatttcaataatgtatttaacctgtatttaaaactatgtcgaaatcacattgtagcatggggcactggccatgtttcagatgttgagtatgtgactgtatggaatggtatagaactagagaggaaaaccagtccctgaagaaggtggcaataagtgaagtgtaatagcaggaaaaaagtaatggtaggaaaaacaaggaagaaggggtggctttttttttctgagatgaagtttcgctcttgtcgcccaggctggagtgcaatggcatgctctcagctcacttcaacctccgcctcctgggttctactaattctcatgcctcagcctcccgagtagccagaatgacagacatgtaccaccgtgcccagctaatctttgtatattttggagagacatcactttgccatgttgcccaggctggtcttactccttgcctcaagtgatccacctgccttggcctcccaaagtgccaggattccaggcatgagccactgcacctggtcagggtggctctttctttagaaggtacctttcagcagttattggagctgctacctgtaggctgagaaagaaccatccaggagaagagtgtttcaggcagagggaacagcaagtgccaaggccctgaggcagaatttcaagatggggtcagtgaggggcagaggcaaatcgcccagggccctggaggcagaagggagaatcctgggttttcctatagtggggtgggagcgtttgaagcagagttgggcttctcatgtgtccttcctccccgcaggctggacatactgcaccaggttgctatgtggcagaagaacttcaagagaattgtgagtgcctaaatggagcaaggtggtgggaaggagcttcctggggaggttggggataggacccagaggaagcccatcgctgggttttctctggactgctcggctggggcctcatctgtctcctgaactattcaccgatgggtccatttttggttctcttttttttgtttgtttttgagatggagatggagtctcactctgtcacccaggctggagtgcagtggcgcaatcttggttcactgcaacctccgcttcctgggttcaagcgattctcctgcctctgcctcctgagtagctgggattacaggtgtgcaccaccatgcaggctaatttttgtatttttagtagagatggagtttcaccatgttggtcaggctggtctcaaactcctgacctcaaggaacctacctgccttggcctcccaaagtgctgggattacaggcgtgagccaccgtgcccagctcattttcagttgttttctgatcactcactgatgtgggcattgtggtgggtgagaggatatagcagggaccacgaggacaaaacaggcaaggtccggctgtgtgcaagtggctcaggcctgtaatcccagcactggaagctgaggtgggtgggttgcttggggccaggaaagaccagcctgggaaacagcaagacccagtctctaccccttcccccacaaccccaagaaaaagatgggcaaagtccctattctaatgaaggtcacagtgtcatgggaggagaagtgaaggtgagtcagatggtcatacgtaatgtgtaattatgagcatgtcccagagaatgggacgttcaaccttgggtctactgtagaagctaaccagatcaaggaggcagtggggctagtgtggagataacaggaacagggtgtgcaaaggccctgtggcagggaccacaaggaagccagtgttgccacagaggccagtgggagcagtggggaggagtctgggttttgtgccaagaacattgaagaatccattaccagtcagggtcttatccatccaccccagaggtctggccagtcctccccctgctcacaccttccctggctccccatcaccctaggaataaagtcatcagtctgctattctgagttcttcctgatttccttgccctgctcctctttcctgattctccctgtctgtgtcatttcccatggccctccctccttgtggctacaaccacattaaaattgttcaaaaaataggccggcacggtggctcacacctgtaatctcagcactttgggaggccaaggcaggtggatcacttgaggccaggagttccaaaccagcctagtcaacgtggcaaaaccccatctctactgaaaatacaaaaaattagctggggccaggtgcggtggctcacacctgtaatcccagtactttgggaggccgaggcggatggatcacgaggtcgggagatcgagaccagcctgaccaatatggtgaaaccccatctctactaaaaatacaaatattagttgggtgtggcagcgggcgcctgtagtcccagctactctggaggctgagacaggagaattgcttgaacctgggaggcggaggttgcagtgagccgagatcgcgccactgcactccagcgtgggcgacagagcgagactccatctcaaaaaaaaaaattagccgggcatggtgacaggcacccgtaatctcagctactagggaggctgaggcaggagaatcgcttgaatctaggaatcagaggttgcagtgagccaaggtcacaccacttgcactccacagcctgggtgacagagtgagactgcctcaaaaaaaaaaatcaatagttcagaaaataccgagcaccccctgcgtgcccggtggcagggcccctgcctttgtgaggctggcatggggcaggagctgtgacttctttaccctccccctcgctccccaagtactctgtgcttggccagagagagcccgtcatcatggtgcctcctgtctgacttccccgtggcaggactgatctgcccggctccctgacacctgcctcgtggacctgacccccctcctctttgtgcctccagagctatgccaagaccaagacgagagccgaggtgcggggcggtggccggaagccttggccgcagaaaggcactgggcgggcccggcatggcagcatccgctctccgctctggcgaggaggtaacaggacagggtggagggggcggggaggggtgggggggccagggaagggcctgggtgtttactcacacacagctgcgcacatctggcatggtattatgtcagccctgttccctccacctcatggaaccacctgggctggtgacatcggaactgaggcccttggacctcactacccatataaggggacagagatctgggagccatccactcctccctctcgcatgccctgtctcttcagcctgtggccacagcccctcttgaccccacctcctgtcaccctctcctgacccacacttcccacagcacccagagagctcttctaaatcgtggaacctgaactccggacctcggcctttgtgtggaacctgaactcctgaccttgtcattgtgggccctggtggctgcacacctttccccctcatcccctcctttccctctctgaccaggcagagatgactctctcttgttttttcggttgtgtttgtttttaactttttattttcttgaatgctaacaagatgactcagggtggtgccagccaccccatcacctgtttacctggccagctctcctcacctttcagggttctgggccacacctcctccaggaagccccccttgatctcctttccttccacatcccccggagctaccctgatttcttctacagctgagcctcttttctgccctgccggaatgtgaatggcatgagggcagggaccatgtctgttgtcttctctgctgcatttccaaggcccaggcgagggcagacaccaacacatggtgcttgcaggggtctccctgactgttgttgctcccagatcatactgcttgctccaccggagcatgtgcctgatgccttcctctcccgcttgacctgaaagttcgaacctcctgataacttcagcattaacagcgtgcttgagttaagttcacactctagccactctatggaatccacaccataactcatggtgtcctatggggcaggaactgtccgatctcaaggtggtttgttttttttattgtttgcttttgagacaagatctcgctctgttgcccaggctgtagtgcagtggtgcaatcatagctcactgcagccttgagctcctgggctcaagtgatcctccatcctcagcctcccaaaatgctggtgtgagccaccttcgccagccctgtctcagagtgtgacagctgggaaaactgaagcccagtgaagcaaagtcactggtcccatgttgtccctgatccagcctcccctgaggccccaccctctctgccttgttcctggcagcgccccctctctcgtcaccccatgccagccactgcagcagattgctgacctccaggctctgcagtggcccctacctgctcacatgcctctgtccccgcaggaggtgttgcccatggcccccggggccccacaagttactactacatgctgcccatgaaggtgcgggcgctgggtctcaaagtggcactgaccgtcaagctggcccaggtacagccatgggggggcccagacagctgctagaggtggggctgctctggacccagggttcaaaccatcctttccttccaccaggacgacctgcacatcatggactccctagagctgcccaccggagacccacagtacctgacagagctggcgcactaccgccgctggggggactccgtactcctcgtggacttgtgagggcacagggcagagcaggggcagggggccctgagctccgtactctgagggttcaacccccactccctggcctctcttacagaacacacgaggagatgccacagagcatcgtggaggccacctctaggcttaagaccttcaacttgatcccggctgttggtgagcaaagagcccaggcccctagagtgcgcatgtgcaggctccgctgttagaatcacagcggttcaaatccggcatctggtcgctgagtggcctcaggcagtgaccacgctcccggacccaaccttcagcttgcccaaagcaataatctttcctaaagaagtgcttggctggggatggtggctcacgcttgtaatcccagtactttgggaggccaaggcagtctgggcaatatagtgaggctcccatctgtactaaaaataaaaaagttaggcgtggcgatgtgcacctgtagtcccagctactcgggggctgagccaggcggatagcttgagctcagggggccaaggctgcagtgagtcatgatcgcaccactgcacccaaacctggggagagagctagactcttgtctcaaaaaaaaaaaaaaaaaaaaaaaaaaagctccaaagtcacctctgtcaaagccacagtctgttccttccacagccacaagatggcgacatgagcctaagtcaagtcctgtccctcaacccacgcccctcgctggcttccccacctctctcaggatgaaagcccaagtcatcagggtggcacgtcaggccctgcacgatgtgccccgtcacctccctgccctcccgtcatttgccctgggtctcccccaccagaatgggagccaggagtcccagccaggcacaggaccgagcctggctctcggtcagcaggtgatgagctgggagcagctccttggccagaggcttacaggcaacaagcggccaggcagggtctggccccgggctgctgggctcacaaagtcacactagaccacagtgacgatctctgtaagcacaaagggactccgatgtgggtggggtgaggagagaggcagccccggcctgaccggccccccgccccgcccccaccccgcccccaggcctaaatgtgcacagcatgctcaagcaccagacgctggtcctgacgctgcccaccgtcgccttcctggaggacaagctgctctggcaggactcacgttacagacccctctaccccttcagcctgccctacagcgacttcccccgacccctaccccacgctacccagggcccagcggccaccccgtaccactgttgatgtgaagcacctcttctgagccaggccgagcccctggccgacttgggagcctcaggcccacgcccacccttcgaggaaggtgtcacctggaccccttcattccacggaggaagctgaggccacagggagcggccatcgccattgggaaggggcgactccacggaaagcccagacgggcttctgcatccattccctctttttgtttttaaaataaattgtatttttgaatcaaggaggataaagataacttctcagtgtcatttttgataattgcattgagaacgatgagctccttcccaggttctgggcactgttggggatccgccgtctcaagaggctcacggtctggtttaggggaaccccagggctgtttgtggaaattacaagaattcacttacccggtgagtcagactccaggagctcacaggtgcgtgggcgctggcacttcctaggagctgactcctgccacatccctctcctgagcactgctgccagccattctcacccctgagagggtttgcagtcctgtctgcgacagtacttcatgcagcctgagagtgtgtgcttgattgtacaagtagatgttgtgtaaacctgagttttcagagtgacttcctgtaagcacagtcagaaaagtaaatgtctctctgtaagtgagcagataagcacatgcttaaaaacaccagctgggcgtggtgactcgcacctgtaaccctagcactttgggaggtcaaggtggaaggatcgtttgagctcagagcttccagaccagcctgggcaacatggtgaaaccccatctctgcaaaaaatataaaaattaagtgggcgtgttggcgtccacctgtggtcccagctacttgggaggctgaggtgggaggatcacctgagcccaggaagcagaggttgcagtgagctgagactgagccaccacacaccagcctgggtgacagagtgagacactgtcttaaaaccccaatatcccaatttttgagtttgctgaggttgccagccaagttaatttttcttaacagccataacagactataatatagacaatgtgatcgatttatttaaagtcaaccagctgggcgcggtggctcacgcctataatcccagaattttaggaggctgagccaggtggatcaccggaagtcaggagttcgagaccagcctggccaagccgggagtggtggcgggcacctgtaatcccagctacttaggaggctgaggtgggagaatcgcttgaacccaggaggcagaggttgcagtgagccaagatagcgccactgcgctccagcctgggtgacagagcaagattccatctataaataaataaataaataaagtcaatcaggactgccttctgcctgtgtgggcctggccaggctaagcagccacacaaccctccctacctgctgggccacccctggctgaaaacctctctggaatgcctctcttgggattgccttcagagattgcaacacattctccaaacaccctcagtggacatagactttgatccttgaagcagcagatttgactaagtaaaaaagaaaaagctattaaaaccagttggctgggcgcggtggctcacgcctgtaatcccagcactttgggaggccgaggcaggcggatcacgaggtcaggagatcgagactatcctggctaacacagtgaaaccccatctctaccaaaaatacaaaaaattagccgggcgtggtggtgggcgcctgtagtcccagctactcaggagactgaggcaggagaatggtgtgaacccgggaggtggagcttgcagtgagccgagatcgcgccactgcactccactccagcctggcgacagagctagactgtctcaaaaaaaaaaacagaggcgtgccaaagctcagcagaaaatgccgcctcatcactcttcctcttgccagtcttgtgggggcaccaaggcctagagtaacacccagctgttggcctgacagtgcctggcccagcctggagagttgcagccagaagtataaatgtggttcagtctgcgtcatacctgtcaggaaacatggtgagaccaactgctgcccagacggattttcaaaagaaatgggtcagaacgtattcccccacactggaatccctcagccagattgaggataaaaacaggcatcagaaaaaaatgatacaggcaggcctggtggctcatgcctgtaatcccagcactttgggaggctgaggcgggaggatcgcctgagcacaggagtttgagaccagcctgggcaacacagtgagaacctatctctactaaaaatagaacaattagccaggcacggtggtgtggctgtggtcccagctactctggaggctgaggtgggaggatcacttgagccctaggggtagaggctgcagtgagcggagatcaccccactgcaatccagcctgggcaacagatcaagaccctgtctcaaaaaaaaaaaaaagaaaagaaaacaaaagaaaaatatgatacactgactagaatgtgctttaaaataattggcatagttgggtatggtggcatgcacctgcagtctcacctacttggaaagctgtggccaggagtttgagaccagcctgggcaacacagcaagacctcatctctataaaaaataggcggggagcagtggctcacgcctgtaatcccagcactttgggaggccaaggcaggcggatcactagaggacaggagttcaagaccagcctggccaacatggtgaaaccccatctctactaaaaatacaaaaattggcaggatgtggtggcgggtgcctataatcccagctacttgggaggctgaggcaggagaatcgcttgaacctgggaggcagaggttgcagtgagccgaggtcatgacactgccctcaaacctgggtgacagagcaagactcggtctcgaaaaaaaaaataatgaatgaatgaattaattcattaattaaatagggggggtatatgagtttgttagggctgccgtaggagtgccacaaactgcaggggttgggggggttagtcaacagaaatttattctgtcctgtttctggaggctggaagtccaaggtgaagaacagggttagctccttctaagggaaaatctgttccagatccctctcctagcgtctggtggtttgctttgctgactatctttgacattccttggcttgtagccacactgcttcagtctccaccttcatctttacatgatgttgtccctgtgggtatgtgtctgtttctgtgtctaaatttctcctttttatttttttcttttttctctatctttttttttagacggagtcgcgctctgttgcccaggctggagtgcagtggctcgatctcggctcactgcaacttctgcctcctgggttcaagcgattctcctgcctcagcctcccaagtagctgggattacaggcgcccaccaccatgcctggctaatttttgtgtttttagtagagaaggggtttcgccatattggccaggctggtaacctcaggtgatccacccgctttggcctcccaaagtactgggattacaagcgtgagccaccgaacctggcctattttttcatttatttttagacagagttttgctcttcttgtccaggctagagtacaatggcgcaatctcggctaatctcaacctccgcctcccgggttcaggcgattctcctgcctcagcctcccaagtagctgggattacaggcatacgccacaatgcctggctaattctgttttgttagcagagatggggtttcaccatgttggtcaggctggtctcgaactcccgacctcaggtgatccacccacctcagcctcccaaagtgctgagattacagacacgagccactgagcctggccctctcctttttatttttaaaatatattttgtggacggcagcagtggctcacacctgtaatcccagcactttgggaggccgaggcgggtggatcacaaggtcaggaactcgagaccagcctggccaatatggtgaagccccatctctactaaaaatataaaaattagccaggcatggccgggcgcggtggctcacgcctgtaatcccagcactttgggaggccgaggcgggcggatcacgaggtcaggagatcgagaccatcctggttaatacggtgaaaccccgtctctactaaaaatacaaaaaaaaaattagctgggcgaggtggcaggtgcctgtagtcccagctactcgggaggctgaggcatgagaatggcgtgaacccgggaggcggagcttgcagtgagctgagatcgcgccactgcactccagcctgggtgacagagtgagactccatctcaaaaaaaaaaaaaaaaaatttagccaggcgtggtgtcagaagcctgtagtcgcaactacttgggaggctgaggcaggagaatcacttgaacccaggaggtggaggttgcagtgagccgagaccacatcacggcacatctaaaaaaaaaaaaagttttctgtttttgttttttgcaaaactactgaaataaatacagtgagatatttatttataaatgagaacgaattaataatgagccgtaggctgggtgtggtggctcatgcctataatcccagcattttggggggccaaggcaggtggaacacttgaggtcaagagttcgagaccaggctgaccaatatagtggaaccccatctctactaaaaatacaaaagaattagccgggcatggtgccgggcgcctgtaatctcagctatgggaggctgaggtaggagaatcgcttaaaccctggaggcggaggttgcagtgaggcgatatcacgccactgcactccagcctgggggacagagcgagactccatctctaaataaataaataaggagctgtatttcaaaatttggagaaggtgacactgagagtactgaatacacagttttttgtttttttggttttttttgagacagagtctcgctctgtcacccaggctggagtgcagtggtgcaacctcggctcactgcaatctctgcctcccggttcaagcaaatctcctgcctcagcctcccgcgtagctgggattacaggcacgcatccccatgcctggctaatttttgtatttttagtagagacgggatttcaccatattggtcaggctgatctcaaactcctgacctcgtgatctgcctgcctcggcctcccaaagtgctgggattacaggcgtgagccaccgagcctggccccaaaaaatatttatcaaaactatgttaatgctggccgggtgcggtggctcatgcctgtaatcccagcactttgggaggccgaggcaggtggaacacgaggtcaggagattgagaccatcctggctaacacggtgaaaccccgtctctactaaaaaatacaaaaaattagccgggcgcggtggtgggtgcctgtagtcccagctactcaggaggctgaagcaggagaatggcaggaaccggggaggcagaggttgtagtgagctgagatcgcgccattgcactccagcctgggcgacagagcgagaatccgtctcgaaaaaaaaaaaaaaatacacacacacacacaaaaactgtgttaatgcttaactacacaaaaatgataatcagataaatatgcatttatttagagaactgcatgttggtcagtccagtccctgcagagggaattcccagcatgacctcattcacttgtgaagacagagcaatccttgtgttttatttttttaagatggatctcactctgttgcccagactggagtgcagtggcatgatctcagccctctgccacctccaccttccgggttcaagagattctcatgcctcagcctcctgagtagctgagattacaggcttgtgcctccatgcccagctaatttttttatttttactagagatgaggtttcaccagtttgggcaggccggtctcaaactcctgacctcaagtgatccacccacctcggcctcccgaagtgctgggatgacaggtgcctggtcagcaactgttgtttagacatacacattttatctgctcgtccagcatggtcagccctccactttttaaattttattttatttatttttttgagacagagtctcactctgttgtccaggttggagtccagtggcgtgatttcggctcactgcaacctctacttcccaggttcgagcaattctcctgcctcagcttcccgagtagctgggattacaggcccgcgtccccacacctagctaatttttgtatttttagtagagacagggtttcaccatgttggccaggctggtctcgaactcctgacctcaggtgattctcctgccttggcctcccaaagtgctgagattacaggtgtgagccactgcacacggccttaaattttatttattatttatttatttatttatttagagacttagtctcactctgttgcccaggctggagtgcagtggcatggtctcggctcactgcactccacctcctgggttcacgccattctcctgcctcagcctcccgagtagctgggactacaggcgcccaccaccactcccggctaatttttgtatttttagtagagatggggtttcactgtgttagccaggatagtctcgatctcctgacctcgtgatccgcctgcctcggcctcccaaagtgctgggattacttattttgttttttgtagagacaggttctcactgtgttgcccaggctggtcttgaactcctgatctcaagtgatcttcccacctcagtctctcaaagggctgggattacaggggtgagccactgcaccccaccttccctctactttttgacggtttccttctgctatgaatgtgcatgtccagttgtctgcttcttagaactgatatttaccttcctcatccatcagccattggaggaggactgggaccgctcagattattgatctgacccattctttcggcagggtttcctggtggctgtcttccatcaccaaaactggaatcagaagagtttccatagccctttttttttccccacatctttgctgaagcagagttttgaaaaacaaaaccacaaactaagctattccccagaagaaatctgtaatcaaagataagctctgccgggcacagtggctcacgccttttggaggccaaggcgggcggatcacctgaggtcaggagttctagacctgccaggccaacatggtaaaacctcatctctactaaaaatacaaaaattagctagatgtggtggtgggtacctgtagtctcagctacctgggaggctgaggcaagagaatcgcttgaacctgggaagtagaggttgcagtgagccgagattgcaccactgcactccagcctgggcgacggagtgagacgacctcacaaaaatttacataaataaaatgaaaagtaaaataaaaatacaaaagttggccgggtgcgtttgctcacgcctgtaatcccagcactttgggagggtgaggcaggcagataatgaggtaagaagatcgagaccatcctggctaacacggtgaaaccctgtctctactaaaaatacaaaaaattagctgtgcgtggtgacacgcacctgtagtcccagctatttgggaggctgaggcaggagaatcacttgaacctgggaggtggaggttgcagtgagccgagatcgcaccactgcactccagcctgggccacagagtgagactccatcttgaaaaaaaaaaaaaatacaaaagttagccaggggtgttggtgggtgcctgtaatcccagctatttgggaggctaaggcagaagaatttcttgaacctaggaaacggaggttgcagtgagccgagatcacacctctgtactccagcctggacaacagagcgagactttgtctcaaaaaaaaaaaaaaaaaaaaaactaaataggccgggagcagtggctcatgcctataatcccagccctttgggaggccaaggcaggtggatcacttgaggtcaggagtttgagaccaggctggccaacatggtgtaaccccgtctctactaaaaacacaaaaattagccgggtctggtggcgtatgtctgtaatcccagctactcgggaggctgaggcaggagaatcacttaaacctgggaggcaggggttgcagtgagctgagatcgtgccactgcactctagccagggtgacagagtgaaactctgtctcaaaaaattaaaaaagaaattcagcaagtaatgagttaaggaattcgaatattaaggcgagtgacaaggaacgcccaggatgtggcccaggatggagtaggggggacactcatttaggagaaagctcaggccacaagacaggaggagccagccttgttggggttgaagggaagagcattccaggctgagggaactgcaaggcgtttgcatgggacactatgggatggcttctgcccttggtgggcagcctctggtctgaggccattctttggcctgcctgactgtctggcaaccgggaggaagccctgcccttcctggagacagaaacaaaggtctaggaaatatctgcttcccttttccttgaaaaacgcttaagggaacggaggactgggaggtgccgtctctctctgccagcctgccccctaccatagccatcccactcccatctcagaaagtgacccgccatcctccaaaaggctcggaccctgatcaaggagtcatcccccttgtcccagcacctccagttggcccagcctccaaaacggatgtcaaattcagccctttctccaaggacactgcccagtccaggccccactatcattcatctggactagaacagtcacctcctctcccatctcctggctgcagctcttgaagcctcaactgggcccctgtgaacacttgagttagggcaaggtccttcctctgctcagaaccctctatacctcccacctcgctgggcataaaagccaaagtcctggccaggcacggtggctcacatctgttatcccagcactttgggaggccaaggggggcggatcactagaggtcaggagttagagaccaacatggtgaaaccccatctctactaaaaatacaaaaattagctaggcgtggtgacgcacccctgtagtaccagctactcggtaggctgaggtgggagaatcgcttgaacctgggaggcagagtttgcagtgagccgagatcacaccactgtgctccagcctgggtgacagaacgagactggggttcagaaacaaacaaacaaaacaacaaagtcctcctcaggtgacaggaacttgcacctatctgccctgtcatctccctgcccgctcctctcctcgaatctctcctttgctaagcctgctccagccacactgttctcctggctgttcctttttttttttttttttttttttttttgagtctcactctcacccaggctggagtgcagtgcctctatcttggctcactgcaacctccgcctgccgggttcaagagattctcctgcatcagcctcccaagtaggtggaattacaggtgtgcaccaccacacccggctaatttttgtattttgcatagagatgggggtctccctatgttgcccaggctggtcttgaactcctgggctcaagtgatcctcccatctcggcctcccaaaatgctgggattacaggtgggagccgcgcccaggtggatttttgtctgactctgttcattcctgtgtccccagtacctggaaggacgccaagcacacagtaggcgcttaaaaaacattgagccacatgttgagaaaagaacggcaccattgtggctgcaagtgggacttgggccgcgcgggggagctcgcgcacctcgggccggggcaagagctcagtggaacccgcccgaggaagaacccgtggcgcaggattttcccaggccttctgaggaccaggggcgtcccccgtcccaccctgtgactttgctcaggccgttccggggcgggaattcagaactcctcagccccccaagaaaaaaatatccccgtggaaattccttgggaatgaccgaggcgggggaaatatgcgtctctggatggccagtgactcgcagcccccttccccgataggaagggcctgcgcgtccggggacccttcgcttccccttctgctgcgcgacctccctggcccctcggagatctccatggcgacgccgcgcgcgccccacaacaggaaagccttaggcggcgcggcttggtgctcggagacttaagagtacccagcctcgacgtggtggatgtcgagtcttggggtcacacgcacaggcggtggccaagcaaacacccgctcatatttagtgcatgagcctgggttcgagttgccggagcctcgcgcgtagggcaggggttcgagcgccccttctccctgcctcgcctctgcgcctgggggctgctgcctcagtttcccagcgacaggcagggatttcgagcgtccccctcccctccctcgtcaagatccaagctagctgcctcagtttccccgcggagcctgggacgccagcggaggggctcggcgcgtagggatcacgcagcttccttcctttttctgggagctgtaaagacgcctccgcggccaaggccgaaaggggaagcgaggaggccgccggggtgagtgccctcgggtgtagagagaggacgccgatttccccggacgtggtgagaccgcgcttcgtcactcccacggttagcggtcgccgggaggtgcctggctctgctctggccgcttctcgagaaatgcccgtgtcagctaggtgtggacgtgacctagggggaggggcatccctcagtggagggagcccggggaggattcctgggcccccacccaggcagggggctcatccactcgattaaagaggcctgcgtaagctggagagggaggacttgagttcggaccccctcgcagcctggagtctcagtttaccgctttgtgaaatggacacaataacagtctccactctccggggaagttggcagtatttaaaagtacttaataaaccgcttagcgcggtgtagaccgtgattcaagcttagcctggccgggaaacgggaggcgtggaggccgggagcagcccccggggtcatcgccctgccaccgccgcccgattgctttagcttggaaattccggagctgaagcggccagcgagggaggatgaccctctcggcccgggcaccctgtcagtccggaaataactgcagcatttgttccggaggggaaggcgcgaggtttccgggaaagcagcaccgccccttggcccccaggtggctagcgctataaaggatcacgcgccccagtcgacgctgagctcctctgctactcagagttgcaacctcagcctcgctatggctcccagcagcccccggcccgcgctgcccgcactcctggtcctgctcggggctctgttcccaggtgagtcggggtggggattgccgtcgggccagttctccgaagccccgggaggaccggctcccgggtcaggtcatgcatgcttaggtagctgtttatgggaaggaggggctagagacagcgattgaaaggcaacagccagtaggttcgaatccagaccctgcatacctccacgtgtggccttgggctatagattgcagctttaaaaaagggtagggggttggagatggaggggaggggcgggcctcgttttgttgcccaggccggtcttgaactccgggggtctagccttacctcctgcctcagcctcccgagtagctgggatgagaggtgtgaaccaccgccttgcttggctagattgcgtctcttacagtttctcagctgtaaaacgggaaacgttatagcggccacctggcagggtatcttggcccagcgcagcacctggccccaggactcgatcatgatggtttgggaacttggctctgtgccaacccaacaaggcttaagggacccccacccccctcaagatgtatattctgttcctcatcctctctgcccctggggaagtccagggctgcttctacttgggggaattccagagctgacttatccgtggcccaaagctgagaagtgggacgccccagcacaccctcccccagctccagcccagctagggaagagggaaggggtcagagggtctttcatggtggtgtaagtttggggaaccaggagggtgggagattgacagcttggttaacagctcaacaaagcctgagatccaggccagcacggtagttcatgccagtaatcccaacactttaggagccccaggcgggcgaatcacttaaggtcaggagtttgagaccagcctggccaacatggcaacatcccgtctctactaaaaatacaaaaattagctggcatggtggtgggcgcctgtgatcccagctgctcgggaggctgagggaggaaaatcccttaagcccacgaggctgaggttgcagtgaaccaagattgtgccactgcactccagcctgggagacatagcgagattctgtctcaaaaaacaaagcgttctgatccggactcagacccagatcgcactgctttctagctgagtaaccatttctctctatgaaatgggaatggtcccagaatctcccttggagaatgtatggagccagtgtcctcacacccccatccaagatagaacaaatctgagacaggaatctttgagtgaggcagtgctgggctcagacattttttcccaccttcggaggcagcagaatctgagggacctgatccaaataagccccttctttctttcttttcttttcttttttttttttttttttttttgagacggagtctcactctgtcgcccaggctggagtgcagtggcgtgatctcggctcactgcaacctctgcctcccaggttcaaacgattctcctgcctcagcctccctgagtagctgggactacaggcatgtgccatcacacccggctaatcactgtgttagccaggatggtctcgatttcctgacctcatgatctgcccaccctgcctcccaaagtgctgggattacatgcgtgagccacagtgcccaccccgtaagccccttctttcttacctgcaaggtagccagttgctacccatcctgtgctgagttacttgtattagcaagggatggggtggctatactcacccaccttacagatggggaaattgaggcccaaagagggggaaactacgtgtctcagggagtgaggagccagtctgattcctggagggctgactgtctccacctgacttcttaggagggaggagggcaccaacttcacattaaaatctggttggacacagtggctcacacctgtaatcctggcattttgggaggcttaggcgggaggatcacttgaggccaggagtttgagaccagccttagcaacatagtgagaccccatctctacaaaaatgtttttcagggccaggcgcggtggctcacacctataatcccagcactttgggaggctgaggcgggcggattacctgaggtcaggagtttgagaccagcctgaccaacatggagaaaccccgtctctactaaaagtacaaaattacccgggcgtggtggcgcatgcctgtaatcccagctactcgggaggctgaggcaggagaatcgcttgaacctgggaggcggaggttgcggtgaactgagatcgtgccattgcactccagcctgggcaacaagagctaaactccgtctcaaaaaaaaaaaaatgtttttcaaatattagccgggtatggtggtgtcctgtagtcccagctacttgggaggctgagatgggaggatcacttgagcccaggagttcaaggttacagtgagctatgattgtgccactgtattccagcctgggtaacagagggagacccgtttaaaaaaaaaaaagtgatggctaaagtccttccatggctccctattgccctcagtataaagaacacatgtggctgggcgtggtggttcacgcctgtaatcccagcactttgggaggctgaggcgggcggatcacttgaggccaggagtttgagagcaggctggccgacgtggcgaaaccccgtctctattaaaaatacaaaaattagctgggcgtggtggtgcttgcctgtaatcccagatactctggaggctgaggcaggagaatcacttgaacccgggaggcaaaggttgcagtgagctgagattgcgccactgcactccagtctgagtgacaaagcgagactccatctcaaaaaaaaaaaaaataaaagaacacatctttagcatggccttcagtgctcacgggatcttcctgaattaatctccccctcttcatccttgctcactcagctccagccaccctgccccgggacatctgtacttgcctggaacttatttcccttttctccggacagccagccctttctcgtcatttagatctctgctgaaacattaccctgtcaccaaagcactgtctattctatcaccctgttttgtttttgtcaaagctcatattaacatcagttattaattatcttgtttgctcataatttttttttttttttttttggagacagagtctcgttctgttgctcaggctggagtgcagtggcacaatcttggctcactgtaacctccacctcccaggttcaagtgattcttgtgcctcagcctcccaaatagctaggactacaggcacgtcccaccatgcccagctaatttttgtatttttagtggagacggggctttgtcatgttggccaggctgatctcaaattcctgacctcaagtgatctgcccgccttggcctcccaaagtgctgggattacaggcgtgagccaccacacccggcctgctcatgaattttctctttaacttccacatcgaaggcaaagtattgtcttgttaaggctgtgcctccagcacccagcacaggctgggcgcacattcccttgatgaacctgatttgtaatgcctgtcgcctcttccctcgtttcttctaggacctggcaatgcccagacatctgtgtccccctcaaaagtcatcctgccccggggaggctccgtgctggtgacatgcagcacctcctgtgaccagcccaagttgttgggcatagagaccccgttgcctaaaaaggagttgctcctgcctgggaacaaccggaaggtgtatgaactgagcaatgtgcaagaagatagccaaccaatgtgctattcaaactgccctgatgggcagtcaacagctaaaaccttcctcaccgtgtactgtgagtaactgagcccggagggctggactaggcagacccggtgggagagacgtgcaggggcacctgcagaggcctgggggaatctttgccacttgctcgtagggtcaaggaggggctccttgcagggcaggtggggacatccttggaaagtccctttgtgaatttctttgggtacaattaaagtatttacaggctgggtgcggtggctcatgcctgtaatcccagcactttgagaggctgaggctggcggatcacctgagatcaggagtttaagtttcgccaacatggcgaaaccctgtctctgctgaaaatacaaaaatcagccgggcatggtgtcaagcgcctgtaatcccagctacttggaaggctgaggcaggagaacgcttgaacctgagaggcagagattgcagtgagccgcgatcgtgccagtgcactccagtctggataacagagcaagattccatctcaagaaaaaaaaaatgccatctctctatgcctcactctttgaacatatgacacggtcctgcttcagacactttaataaaagatgcaaattaagccaagtgtggtggcttgtacctataatcccaactactccagaggctgaggcagaaggatggtttgagcccaggagtttgagaccagcctgggcaacagagtgagaccctgtttctttcttttttttttttttttttttgagacggagtctcactctgtcgcccaggctggagtgcagtggtgtgatctcggctcactgcaagctccgcctcccgggttcacgccattctcctgcctcagcctcccgagtagctgggactacaggcgcctgccaccatgcccggctcatttttttgtatttttagtagagacggggtttcactgtgttagccaggatggtctcaatctcctgacctagtggtccgcccgcctcggcctcccaaagtgctgggattacaggtgtaagccactgtgcccatccaagaccctgtttctaccggaaaaaaaaagtaaataatttagctgggcatcgtggtgtgcacctgtaatcccagctgctcctgaggctgtgatgggaggattgctttaacccaggggttcgaatcctaggagttcgaatccatcctaggcaacatagcaaaaccccatttttatttaaaaaaaaaaaaaaagatatgagttaaaactagccctgggatggcatttttcacatattggtaacaaacaaaagaattgatggccgggcgcagtggctcacgcctgtaatcccagcactttgggaggccgaggcgggcggatcacaaggtcaggagatcgagaccatcctggctaacatggtgaaaccccgtctctactaaaactacaaaaaattagccgggcatggtggcaggcgcctgtggtcccagctactcaggaggctgaggcaggagaatggcatgaacccgggaggcagagcttgcagtgagccaagatcgtgccactgcactccagcctgggcgacagagcaagactccatctcaaaaaaaaaaaaaaaaaaaagaattgataacagctgtgctgccaaggctattggaacgtaggaggtcctaggacagtgctgttgggagcataaataagcccaaccctgtggcgggaaattgggcatcagttctcaaaatgtcatgggctgggcacggtggctcacgcctgtaatcccagcactttgggaggctgagggaggcggatcacttgaggtcaggagttcgagaccagcctgaccaccatggagaaaccccgtctctattaaaaatacaaaaaaaactagccaggcatagtggcacatacctgtaatcccagctactcgggaggctgaggcaggagaatctcttgaaactgggaggcagaggttgcggtgagctgagattgcgccactgcactccagcttgggcaacaagagcaaaactccatctcaaaaaaaaaaaaaaaagaaataaaagaaggtatgttgaatatgagtggtatgccaccctcacattagggaagggcagtttcggggaggctgtatttatgtataaaatagccctaaaaggaagtgggagaaatgacaatattagctggctatgagaagagaggctgggaggctgtgggagagggcttgggtgtggagaattctttttgttttttcctttttttgagacagagtttcactcttgttgcccaggctggagtgcaatggcacgatctcagctcaccgcaaccttcacctcctgagtttaagtgattctccggcctcagcctcccgactagctgggattacaggcatgggccactacgcctggcaaattttgtatttttagtagagacagggtttctccatgttggtcaggctggtcttgaactctgacctcaggtgatccgcccgcctcggcctcccaaagtgctgggattacaacgtgagccactttgcctggctgagaattctttttttgttgttgtctttttgagatggagttttgctgtgtccccagcctggagtgcaatggtgtaatctcagctcactgcaacctctccctcccgggttcaagcaattctcctgcctcagcctcccaagtagctggaattacaggcgcccagcaccacgcccggctaatttttgtatttttagtagagacgggatttcatcatgttggccaggctggtcttgatctcctgaccttgtgatctgcccgcctcggcctcccaaagtgctgggattacaggcgtgagccactgcccccagccgagaatttctctttgcgtccttcctactttggggacttcgaatggtgggaaagagttatcaaggccaaaataaggaattcaaatgaaaacaaaacaaaatcaaagaagaaaaaacagaagagcactgggcaggctaggcacgtggctcatgcctataatcccagtgatttagaaggccgaagtagaaggatcgcttggaggccaggagttggacaccagcctgggcaacatagcaagaccccatatctacaaaaaataaaaaacctaaccaagcgtgctggcatactagtagtcccagctactcaggaggctgaggtgggaggatcacctgagcctgggaggtccaggctgtagtgagccgtgatgacaccactgcactccagcctgggtgacagagaaagaccctgtctctaaaaaataaaaactggccaagtagctttgggattagccttgggttccagtcccagcaaggcctttaatagcttgggacatgacttctgcatttactttgcaatcaggtgagacctcctctgatggggaaaatgacacggtgagtgacaaaggatgttctcctatcattgtgtcagggcaaggaagcctctgggtaaatgatcaaatgatcagctttgcttctgatttggagggtgggtgagcagatgctgaccttcccaggtgagggaagtccccgaacattcccagcagcttctggaaaccccagggaaacctctttgaaggtcttttctgcatctctgcctgataggtctttttttttttttttttttttttcttttttttgacacacagtcttgctctgtcgcccaggctggatcactgcaacctccatctcccgggttcaagcagttctcctgcctcatcctctccagtagctgggattacaggcacctggcaccacgcctggctaatttttgtatttttagtagagacagggtttcgccaagttggccaggctggtctcgaactctagacctctggtgatccacccgcctcagcctcccgaagtgctgggattacaggcttgagccaccacgcgcggctctgcctgatagctgagagcatagaactccaggtttgagacctggctctgccacatttctccctctatgactgtgggtgccccactttgccttagtttttacctctgtgaaatggagcagatggctggcacaggtagcaaaggagtaaaagttatgtgggagggtggtacctgagagagactctagcttggtcttgccccacccctggtgtaaacataaagaagcctccctggatggctcaatcttctccaaaaaggttagaggtgtaattcctagaggaggcgaccactagctgggctttgaaggatgtgtaggagttcataaggacaggcattctgggcaggaggaacagcctgggcaaaagttgggagcagggagaaatcttgatggaggcaggaggaggaggaggtaggttggtgtaggccaggtgcagtggctcacacctgtaatcccagtgctttgggaggccaaagcaagaggattgtttgagcccaggagttcgagaccagcctgggcaacatagcgagaccctgtctctaagaaaaaataaaaaaattagggtacagtggcatatgcttgtattctcaactactctggaggctcaagtgggaggatcacttgaacccaggaatttttttgtttttgtttttgtttttttgagatggagtctcactctgtggcccaggctggagtgcagtggtgccatcttggctcactgcagcctcctccacctcctgggttcaaccgattctgctgcctgagcctcccgagttgctgggattaaggtgcccaccatcatgcccagctaatttttttgtatttttagtagagatagggtttaccatgttagccaggctggtcttgaacgcctgaccgcaagagatcctcctgcctcagtttcccaaagtgctgggattataggtgtgagccactgagcctggtcaagcccaggaatttgaggttacagtcagctatgattgcaccactgcattccagcccaggtgacagagagagacactgcccctaaaaaaaaaaaaaaaattgattgatgggaggaagggtgaggttggcagagccttgaatgccaggtggaggagctgggactttccttcttggggtgatagggagtcatggagggtttctgagcaggccagggattagatagctgaaggctggatttactggaagccaatgagcagttggctatggtccttgtccacgcggcccatgttgtgggcagtgaccgtattcaagaagggaaggacagacaagtatttgaatacttcagtgaccaggatttggtaaaggactgcaggtcagggtcaagaagaggtgagagcaggacagacttcctccccgctgcaccaggcagctgagctgggtttcctctaggggctgaggtttgagggtacctcaagttctgcaagagtctataggaggtggtaagagagaagagctggaggtcagagttttcttgactatatatatatatatttttttgtttttgtttttaacagcttaacagctttctgttttatttttagagacagggtctcagggtctcactttgtcacccaggctggagtgcagtggtacaatcgtagctgactgcagcctcaaactcccaggctcaagaaatcctcctcccacccttagcctcctgagtagcagggactacaggtgtgagccagcaggaagcccagctggttttttttttttctttggtgttttttgtttgtttgtttgagaccggagtttcgctcttattgcccaggctgaagtgcaatggcaggatcttagctcaccacaacctccgacccccaggatcaagctattctcttgcctcagccacctgagtagctgggattacaggcatgcgacaccacacaaggctaattttgtatttttagtaaagacagggtttctccatgttggtcaggctggtctcgaactcccaacctcagatgatccacctgcctcggcctcccaaagtgctgagattacaggcatgagccaccgtgcccggcctttttttttttttttttttttttgagacagagtctcactctgtcgcccaggcaggagtgcagtggttcgatctgggctcactgcaagctccgcctcccgggttcactccatcctcctgccttagcctcctgagtagctgggactacaggcgcccaccaccacgcctggctaattttttgtatttttagtagagacggggtttcaccgtgttagccaggatggtcttgatctcctgacctcgtgatccgcccgccttggcctcccaaagtgctgggattacaggcgtgagccaccatgtctggcctggccaggctggtcttgaactcctgacttccggtgatccatctgttctggcctcccaaagtgctgggattacaggcataagccaccacgccatgccgaagcccagcttgtttttaatttttttttttttttttggagaaatgaggtcttgcaatgttgcccaagctagccttgaactcctggcctcaaatgaccccgccttggcatcccaaagtactgggattacagatgtgagccaccatgccccagccttgctttcttgagatacgatttagaataccataagattcatcccttttaagcacataattcaatgacttctgtacaaacaaccatgactacaatctaattttaaaatatttcaatcactctaaaaaagaaacctcctgcttatgtacagcgactctgtctacctcttaagtgaattctcctacctttaatagccctattttacagttcaggaaactgaggttcagagagacaaagtcacttacccacagcaaagaagcaaggctgggtatcaaatgcaggacccccccggtcctgatgctttttttttttttttttttttcctctgagagagactctcactctgtcactcagtctagagtacagtggcgcgatctcagttcactgcaatctctgcctcctgggctgaagtaatcctttcctcacaagtaaacctcagcctctcaagtagctgggactacaggcacacaacaccacgcctggctaatttttgtatttttaggtagagacggggtttcactatattggccaggctggtcttgaactcctgacctcaggtgatccgcctgcctcggccccccaaagtgttgggattacaggcgtgagccaccacacgcagcctttttgttattagactctgtcattactgacttttttttttttttaatagaaacagggtctttctttcccaggctaaagtacagtggcatgatcacagttcactatagccttaaactcctgggctcaagtgatcctcctgcctcagcctcccaagtagcagggactacaggtgtgcaccaccacacccagttaaccattcattcattcattcattcatttattttgagatggagtctcgctctgtcacctaggctggagtgcagtggcacgatctcagctcactgcaacctccacctcccaggttcaagagattctcctgcctcagcctcccgagtagctgagactacaggcgtgcaccaccatgccagactaatttttgtatttttaatagagacggggtttcactctgttggtcaggcttatctcgaactcctgacttcgtggatccaccctccttggcctcccaaagtgctgggattaaaggcgtgagccaccgcgccctgccaacctttttttaatttttcttagagatgggggtctccctatgttgcccaggcttgtcttgaactcctggcctcaagtgaccctcttgccttggcctcacaaagtgctaggattacagcctgagccatcacacctggccaacaggtttttttttttgttttgttttgttttttaaagaatgtctaggccaggctcatttactttcacctgtaatcccagcactttgggaggccggggtgggcagatcacttgaggtcaggaattcgagaccagcctgggcaacatgctgaaaccccgtttctactaaaaatacaaaaattagctgggtgtggtgacacgtgcctgtaatcccagctactcaggaggttgaggcaggagaattgcttgaacccaggaggcagaggttgcagtgagccaagatcatgccatcaccctccagcctgggcgacagaaggagactcagtctaaaaacttaattaattaattaattaaaaataaaaatacaaaaattaacctggtgtggtggtgtgtgcctgtaatctaagctactcaggaggctgaggcaggagaatcccctgaatcccagaggcagaggttgcagtgagccaagatcgagccactgtttgcccagtctagtgcactgggctgctgaatttatttgaccagacacctagcaatagactttgaagttcttttccacttttcactctaagatgctgctgtcatgaataaggaatattttgatccccttcacaaacactcggggccctcttaccagttttcactgaagatcttgacattcctatctgcttaggtgtctgggcgtgtttgggggagatactgaagaggtagggctcccaggcaggtgcagttcgtctgttaggcaggcagcaaggtccacttcaccagacacccccacctctgttttcctgcagggactccagaacgggtggaactggcacccctcccctcttggcagccagtgggcaagaaccttaccctacgctgccaggtggagggtggggcaccccgggccaacctcaccgtggtgctgctccgtggggagaaggagctgaaacgggagccagctgtgggggagcccgctgaggtcacgaccacggtgctggtgaggagagatcaccatggagccaatttctcgtgccgcactgaactggacctgcggccccaagggctggagctgtttgagaacacctcggccccctaccagctccagacctttggtgaggattgaagaagccagcagggagaaggtgggggtggggtatcctgcaatgcggtgcctgtggccacaggatcttttgagatgggtgtggccccggctaaggggtgcatgtgttctaggcgtatgtgacctaggctgctgagtggccctggaagaggatctcgcaggagggggaatgaaatgccccagagaagggcttcgggacgtccatccctgtctgctcacacctttcttctctccctagtcctgccagcgactcccccacaacttgtcagcccccgggtcctagaggtggacacgcaggggaccgtggtctgttccctggacgggctgttcccagtctcggaggcccaggtccacctggcactgggggaccagaggttgaaccccacagtcacctatggcaacgactccttctcggccaaggcctcagtcagtgtgaccgcagaggacgagggcacccagcggctgacgtgtgcagtaatactggggaaccagagccaggagacactgcagacagtgaccatctacagtaagaaggggcaggggcggagtggggcttcttgggggtgtgacctgaacccggggcggggctcactgtgtgcctattccaggctttccggcgcccaacgtgattctgacgaagccagaggtctcagaagggaccgaggtgacagtgaagtgtgaggcccaccctagagccaaggtgacgctgaatggggttccagcccagccactgggcccgagggcccagctcctgctgaaggccaccccagaggacaacgggcgcagcttctcctgctctgcaaccctggaggtggccggccagcttatacacaagaaccagacccgggagcttcgtgtcctgtgtgagtggggctgctggtcaatggcccctatcccccaaggcccaatctccctgaaggtcccataaggtcttgcctccaagtcctgcccccacccacctccatgtcatctcatcgtgtttttccagatggcccccgactggacgagagggattgtccgggaaactggacgtggccagaaaattcccagcagactccaatgtgccaggcttgggggaacccattgcccgagctcaagtgtctaaaggatggcactttcccactgcccatcggggaatcagtgactgtcactcgagatcttgagggcacctacctctgtcgggccaggagcactcaaggggaggtcacccgcaaggtgaccgtgaatgtgctctgtgagtgagccggcgggcagagctgggtgggggcaggggccatggacctaatgcaatcctcaccgcctgttgtatcctccccacagccccccggtatgagattgtcatcatcactgtggtagcagccgcagtcataatgggcactgcaggcctcagcacgtacctctataaccgccagcggaagatcaagaaatacagactacaacaggcccaaaaagggacccccatgaaaccgaacacacaagccacgcctccctgaacctatcccgggacagggcctcttcctcggccttcccatattggtggcagtggtgccacactgaacagagtggaagacatatgccatgcagctacacctaccggccctgggacgccggaggacagggcattgtcctcagtcagatacaacagcatttggggccatggtacctgcacacctaaaacactaggccacgcatctgatctgtagtcacatgactaagccaagaggaaggagcaagactcaagacatgattgatggatgttaaagtctagcctgatgagaggggaagtggtgggggagacatagccccaccatgaggacatacaactgggaaatactgaaacttgctgcctattgggtatgctgaggccccacagacttacagaagaagtggccctccatagacatgtgtagcatcaaaacacaaaggcccacacttcctgacggatgccagcttgggcactgctgtctactgaccccaacccttgatgatatgtatttattcatttgttattttaccagctatttattgagtgtcttttatgtaggctaaatgaacataggtctctggcctcacggagctcccagtcctaatcacattcaaggtcaccaggtacagttgtacaggttgtacactgcaggagagtgcctggcaaaaagatcaaatggggctgggacttctcattggccaacctgcctttccccagaaggagtgatttttctatcggcacaaaagcactatatggactggtaatggttacaggttcagagattacccagtgaggccttattcctcccttccccccaaaactgacacctttgttagccacctccccacccacatacatttctgccagtgttcacaatgacactcagcggtcatgtctggacatgagtgcccagggaatatgcccaagctatgccttgtcctcttgtcctgtttgcatttcactgggagcttgcactatgcagctccagtttcctgcagtgatcagggtcctgcaagcagtggggaagggggccaaggtattggaggactccctcccagctttggaagcctcatccgcgtgtgtgtgtgtgtgtatgtgtagacaagctctcgctctgtcacccaggctggagtgcagtggtgcaatcatggttcactgcagtcttgaccttttgggctcaagtgatcctcccacctcagcctcctgagtagctgggaccataggctcacaacaccacacctggcaaatttgattttttttttttttccagagacggggtctcgcaacattgcccagacttcctttgtgttagttaataaagctttctcaactgcctcagccttgtgtgagttgaggggaggtgtcacatccagctggagtcctttctaagcagccacagcctgatcctcccacttcctcccccaagaaaacattgtgggttgatggccataccctgaggttctggtccaaatcggactttctatgaccttctgggtctctagtgaaaactaaagactcctctccagaaaaaaacatttggtttctaatgaggcctggaatcttattcttgacctggggagcggaatccctttttgcagtactcccgggccctctgttggggcctccccttcctctccagggtggagtcgaggaggcggggctgcgggcctccttatctctagagccggccctggctctctggcgcggggccccttagtccgggctttttgccatggggtctctgttccctctgtcgctgctgttttttttggcggccgcctacccgggagttgggagcgcgctgggacgccggactaagcgggcgcaaagccccaagggtagccctctcgcgccctccgggacctcagtgcccttctgggtgcgcatgagcccggagttcgtggctgtgcagccggggaagtcagtgcagctcaattgcagcaacagctgtccccagccgcagaattccagcctccgcaccccgctgcggcaaggcaagacgctcagagggccgggttgggtgtcttaccagctgctcgacgtgagggcctggagctccctcgcgcactgcctcgtgacctgcgcaggaaaaacacgctgggccacctccaggatcaccgcctacagtgagggacaggggctcggtcccggctggggtgaggggagggggctggaagaggtgggggaagggtagttgacagtcgctctatagggagcgcccgcggacctcactcagaggctcccccttgccttagaaccgccccacagcgtgattttggagcctccggtcttaaagggcaggaaatacactttgcgctgccacgtgacgcaggtgttcccggtgggctacttggtggtgaccctgaggcatggaagccgggtcatctattccgaaagcctggagcgcttcaccggcctggatctggccaacgtgaccttgacctacgagtttgctgctggaccccgcgacttctggcagcccgtgatctgccacgcgcgcctcaatctcgacggcctggtggtccgcaacagctcggcacccattacactgatgctcggtgaggcacccctgtaaccctggggactaggaggaagggggcagagagagttatgaccccgagagggcgcacagaccaagcgtgagctccacgcgggtcgacagacctccctgtgttccgttcctaattctcgccttctgctcccagcttggagccccgcgcccacagctttggcctccggttccatcgctgcccttgtagggatcctcctcactgtgggcgctgcgtacctatgcaagtgcctagctatgaagtcccaggcgtaaagggggatgttctatgccggctgagcgagaaaaagaggaatatgaaacaatctggggaaatggccatacatggtggctgacgcctgtaatcccagcactttgggaggccgaggcaggagaatcgcttgagcccaggagttcgagaccagcctggacaacatagtgagaccccgtctatgcaaaaaatacacaaattagcctggtgtggtggcccgcacctgtggtcccagctacccgggaggctgagttgggaggatcctttgagccctgaaagtcgaggttgcagtgagccttgatcgtgccactgcactccagcctgggggacagagcacgaccctgtctccaaaaataaaataaaaataaaaataaatattggcgggggaaccctctggaatcaataaaggcttccttaaccagcctctgtcctgtgacctaagggtccgcattactgcccttcttcggaggaactggtttgtttttgttgttgttgttgtttttgcgatcactttctccaagttccttgtctccctgagggcacctgaggtttcctcactcagggcccacctggggtcccgaagccccagactctgtgtatccccagcgggtgtcacagaaacctctccttctgctggccttatcgagtgggatcagcgcgggccggggagagccacgggcaggggcggggtggggttcatggtatggctttcctgattggcgccgccgccaccacgcggcagctctgattggatgttaagtttcctatcccagccccaccttcagaccctgtgctttcctggaggccaaacaactgtggagcgagaactcatctccaaaataacttaccacgctggagtgagaccacgaatggtggggaggggagggtcccacggacatattgagggacgtggatacgcagaagaggtatccatgtggtggcagccgggaaggggtgatcagatggtccacagggaatatcacaaactcgaattctgacgatgttctggtagtcacccagccagatgagcgcatggagttgggggtggggggtgtcaaagcttggggcccggaagcggagtcaaaagcatcaccctcggtcccttgttctcgcgtggatgtcagggcccccacccaccgagcagaaggcggactcaggggcgctccagggtggctcgagctcacacacgctgagtagacacgtgcccgctgcaccctgggtaaatacagacccggagccgagcggattctaatttagacgcccgcgaacgctgcgcgcacgcacacgtgtcctcggctcgctggcactttcgtcccgccccctccgtcgcgtgcgggagctgacccggaggggtgcttagaggtatggctccgcggggtcaaaaggagaaggatcagtgagagaggcatccccacaccctcccctagaactgtcctttccccatccagtgcctcccaaatctctcttagtccccaaatgtatccccgccctaaggggcgctggtgggaggagctaaatgtgggggcggggctcggagtccagcttattatcatggcatctcagccagggctggggtaggggtttgggaagggcaacccagcatcccccgatcccagagtcgcggccggggatgacgcgagagagcgtggtcgcccccagaaggccctgggccatcatgccggcctccacgtagaccccaggggtcgctcactcctgccagctcgccttcaccaaggccaggagcttagcgcacgctcgcctcccgcccccccgccgcctctgccgccgccccctccttggaaaccaagttaccaacgttaaaccaatccccaagcgcaactctgcctcccccacaccccacccgccgcgccgcgcggagccgtcctctagcccagctcctcggctcgcgctctcctcgcctcctgtgctttccccgccgcggcgatgccagggccttcgccagggctgcgccgggcgctactcggcctctgggctgctctgggcctggggctcttcggcctctcaggtaagagccccgctctggttcggggtggacagggcgggggcggagtccctggacctgagaaacggcctcctgtccctcccagctctgccctcgcctcgctcccacgcctctgcccccacctcgagcctgagtcttctccccttccccctcctccccaacacacacccgagccccagcttcctgactcctcgatagcccctacccgcttcgagatcctaggtgttcttccgcacccaacccttcgccctggagacccagtgtctctcctgtccgctccccgggtacctccttacgctgtgctgtgcaccatggtccacggactggcatcttccccactcgcggtccgcgaagactccatctctccaactaccctgactcagaggcgctgttcccgctccacccagagccctggcaaccgggtccctcagctgttcccgcggttccttccatgagcccagccttgcgtcccggctccgtgttcttcaccgggtgtagggtccttcctgatccttgacccagcctcgtctctcctttgcccttgccgcaaacgcactctcctcgtatcccggcattctgccaggaccctgagaactggttcatcccccatcccccatcccgggtccccttctctcagccttgctgtgttcatccaagaacccacctttcctctcctctacgccctccccccatgctttcccgccgctccatcggcgctttggagaccatggctctctgctaccacgtcccagagacaccctcgaggtttagactctgggagtgcgcctttaaaccggaggcctgggcaggacgcgggacgcctgggttctttccctggctgcagcctctcctcctcctccccgccctctgagaacccttgactcgacataggggcgctaagatgtcagggagttggctccccaggctcagcccgcgtttccctgggcagcggtctcgcaggagcccttctgggcggacctgcagcctcgcgtggcgttcgtggagcgcgggggctcgctgtggctgaattgcagcaccaactgccctcggccggagcgcggtggcctggagacctcgctgcgccgaaacgggacccagaggggtttgcgttggttggcgcggcagctggtggacattcgcgagccggagactcagcccgtctgcttcttccgctgcgcgcggcgcacactacaggcgcgtgggctcattcgcactttccgtgagttctgggtggccacgcgcgtactccactactctccctccctcccaggccccgccccctgggtcccagggtcctccccttcaggccccaccttctgttccaagtcccggtgttcaaagagctgcggactcttcccccttgcagagcgaccagatcgcgtagagctgatgccgctgcctccctggcagccggtgggcgagaacttcaccctgagctgtagggtccccggcgccgggccccgtgcgagcctcacgctgaccctgctgcggggcgcccaggagctgatccgccgcagcttcgccggtgaaccaccccgagcgcggggcgcggtgctcacagccacggtactggctcggagggaggaccatggagccaatttctcgtgtcgcgccgagctggacctgcggccgcacggactgggactgtttgaaaacagctcggcccccagagagctccgaaccttctgtgagtgggtgtggggaggagatggggacccagtggggtcggtcggtgtttaggaggtttagaggtagatacatctgaatgctgaccccgacttcaaccctcgccggctgagctgtttccccctccgtgccttgaggatgataatacgataagatagtgcatgtcaagtgcttaggacatattgagcgctcggagttagttcaaacttggttcttcgacccctagccctgtctccggatgccccgcgcctcgctgctccccggctcttggaagttggctcggaaaggcccgtgagctgcactctggacggactgtttccagcctcagaggccagggtctacctcgcactgggggaccagaatctgagtcctgatgtcaccctcgaaggggacgcattcgtggccactgccacagccacagctagcgcagagcaggagggtgccaggcagctggtctgcaacgtcaccctggggggcgaaaaccgggagacccgggagaacgtgaccatctacagtaaggaaggaggcggggtctccgcggctccgaggtgggaccagaggaatgcgaaggcggggcgaagagtgggcgggacctcagtaccggaacaggcgtggcccgaggggcggggcaggtgggggcggagacgtaatcgctggggaggaggagcctgtacagcctgagaggcggggcgccgtaccctagttcgttctcagcaccccgaggattcgggcagataaggggcgggccttgaccggagggaggggtatggtcagtatactacgaccaaatgctccgcccccaggcttcccggcaccactcctgaccctgagcgaacccagcgtctccgaggggcagatggtgacagtaacctgcgcagctggggcccaagctctggtcacactggagggagttccagccgcggtcccggggcagcccgcccagcttcagctaaatgccaccgagaacgacgacagacgcagcttcttctgcgacgccaccctcgatgtggacggggagaccctgatcaagaacaggagcgcagagcttcgtgtcctatgtgagttggtgataacccctcgccccccaccttctggtgacttccaaggacccgcctgctccctcaccgtgtcgtggaggcggagccatttcttacgtctaagcctctgtaaccccacgccctgcccgcagacgctccccggctagacgattcggactgccccaggagttggacgtggcccgagggcccagagcagacgctgcgctgcgaggcccgcgggaacccagaaccctcagtgcactgtgcgcgctccgacggcggggccgtgctggctctgggcctgctgggtccagtcactcgggcgctctcaggcacttaccgctgcaaggcggccaatgatcaaggcgaggcggtcaaggacgtaacgctaacggtggagtgtgagtgggggtgcgcagggtgcatttctatctggttcaaggtctggagggtggccagcctccagggaagagtaggagtagggtatgaggtgtccctttgggtgaggttttgggaaagggaagaggctggttagtggggttggagaaagatcttggaggatggaagggaccgggtgggcgtgcccctagcctagggcgtggtatttgggcggagtcgtggaaaggcgggcagtccagagtgtttaagtttttagacgaaaaaggcgccactggtggctcaggaagctcccagacagagtgcatgcctcgactagcgtgacacctccttggatcggcgtccaagggttatgcagggacaacacttcgtggaagccttgccgcgccaaggagggtctagggacgtcagatttgcccccaaaccccaaagccaacaatacactccctcctccagacgcaccagcgctggacagcgtgggctgcccagaacgcattacttggctggagggaacagaagcctcgctgagctgtgtggcgcacggggtaccgccgcctgatgtgatctgcgtgcgctctggagaactcggggccgtcatcgaggggctgttgcgtgtggcccgggagcatgcgggcacttaccgctgcgaagccaccaaccctcggggctctgcggccaaaaatgtggccgtcacggtggaatgtgagtaggggcaccgcggagttaggcaggatctgtgggacaaccccggctggacttcctggcccccgtgtgagcccctgcaatcctgtttcccagatggccccaggtttgaggagccgagctgccccagcaattggacatgggtggaaggatctgggcgcctgttttcctgtgaggtcgatgggaagccacagccaagcgtgaagtgcgtgggctccgggggcgccactgagggggtgctgctgccgctggcacccccagaccctagtcccagagctcccagaatccctagagtcctggcacccggtatctacgtctgcaacgccaccaaccgccacggctccgtggccaaaacagtcgtcgtgagcgcggagtgtgagcgaggcccaggcgggtagggagcaggggtgccccacggtccaggcactccctgacatcccccatggctgctttgcagcgccaccggagatggatgaatctacctgcccaagtcaccagacgtggctggaaggggctgaggcttccgcgctggcctgcgccgcccggggtcgcccttccccaggagtgcgctgctctcgggaaggcatcccatggcctgagcagcagcgcgtgtcccgagaggacgcgggcacttaccactgtgtggccaccaatgcgcatggcacggactcccggaccgtcactgtgggcgtggaatgtgagtgggggcagcaccggatggaggggacacggtcctcggaagaatgactcgcagcggtgggagcattcaagggcacctctcccaatcccattctcggggacagggaattccagcctaaaccagggggtaatgaaaattctagccaggcgcagtggctcaggtctgtaatcccaacactttggaaggttgaggcggatgaatcacttgaggccaggagttcgagaccagcccggccaacatggcgaaaacccgtctctacaaaaattagccggtcgtggtggtgggcgcctgtggtcccagctacttgggaggctgaggcaggagaatcgcttgagcctgggaggcagaggttgcagggagccgagatcccgccactgcactccagcctgggcaacagagtgagactctttcttagaaaaacagaaaaagaaaattatagggaataggagcacggccctcctcaaatcctggattagaacactgacctgggcttcacctccttccattcggtgaagaagggcgaggaattttagccgcaacagcagcctgattgtcggggaaggaggctctgataggaggcaggatcctcttctgcccatcagaggcgcggtggtctcccatcgatcgttgtgggccggagcagggcatttgatcagtggctgggccggcgctaagccccacttcaccttctgtgcccttcagaccggccagtggtggccgaacttgctgcctcgccccctggaggcgtgcgcccaggaggaaacttcacgttgacctgccgcgcggaggcctggcctccagcccagatcagctggcgcgcgcccccgggggccctcaacatcggcctgtcgagcaacaacagcacactgagcgtggcaggcgccatgggaagccacggcggcgagtacgagtgcgcagccaccaacgcgcacgggcgccacgcgcggcgcatcacggtgcgcgtggccggtaagtggcagctggggagaggcggggcgaggtatctgagagggggcgtgacctgggtcttggggcggccggccccgcctgcctccctctcggtcccggtagactagacggaagtgggacagagtagaagtcaaaggtgccttagcgggtggggctgttgatcgcactttgaggggtgggagatggaggtggcagggggactgaattcaaggggagggaccctccggggctgtcactgctgcaggaaaggactttaaaacttgggctggattctgcgtggtggaaacttgacccaattcacaatccactgtggggaagattggggagggaccaaagtcattggatgttggagggagagaggggtcaagatcgccttctctcacttcctgaagctcctggggctgggttctctctggggtcgggggaacctgacctggtcctgccggtcctcattttttgggggatggggagagttgacttgtcgccagggggctaagtgtggtcacgggtttatatccccatgggctgaagtgcgatataaatcgggactcgggtcgccctggcactgggagtggccttattgcatgggttgtctcccttctcccaaggccagacagtgagctccccggggcatgaggactgacttcgtgcctgtgggagtgcggggggcggtgggagaagccccccggagcttggccaccctccgcgagggtctccaccccgcaggtccgtggctatgggtcgccgtgggcggcgcggcggggggcgcggcgctgctggccgcgggggccggcctggccttctacgtgcagtccaccgcctgcaagaagggcgagtacaacgtgcaggaggccgagagctcaggcgaggccgtgtgtctgaacggagcgggcggcggcgctggcggggcggcaggcgcggagggcggacccgaggcggcggggggcgcggccgagtcgccggcggagggcgaggtcttcgccatacagctgacatcggcgtgagcccgctcccctctccccgcgggccgggggacgccccccagactcacacgggggcttatttattgctttatttatttacttattcatttatttatgtattcaactccaagggcgtcacccccattttctacccatcccctcaataaagtttttataaaggaactccctgtctccgcttctgtttctgcaaggtggaacaagcccagggttccagtcgtgacctcccgagttattcattcaaaaagcgatttttgagagggcctggggtggtggcttaggcctgtaatcccaggacttgtgggaggcccaggtgggaggatcccttgcacccaagagtttcagaccagcctgggcaacatagggagaccctacaaaaaatatttttcaaaaattagccaaggccggtcgcggtggctcatgcgtgtaatcccaggactttggaaggccgaggcggccagatcacgaggtcgaggtcatgagatcgagaccatcctggccaatatggtgaaaccctgtctctactaaaaatacaaaaattagctgggcatggtggtgcgcgcctgtagtcccagctattcgggaggctgaggcaggagaatcgctttaaccccggaggcagaggttgcagtgagccgagatcgtgccactgaactccagcctggcgacagagcgagattccgtcttaaaaaaaaaaccaggcgtggtggctcacgcctgtaatcccagcactttgggaggccgaggcgggcggatcacgaggtcgggagatcgagaccatcctcgctaacacggtgaaaccccgtctctactaaaaatacaaaaaaaaaaaaaaaaaaaaaattagccgagcgtggtggcgggcgcctgtagtcccagctactcaggaggctgaggcaggagaatggcatgaacccggggagcagagcttgcagtgagccgagatcgcgccactgcactccaccctggcagacagcaagactccgtctcaaaaaaaaaaaaaaaaattagccagggccgagcacagtactctcgcttgaatcccagaactttgggaaactaaggcggggggggggggtcacttgaggtcaggagttcgagaccaccctggccaacgtggtgaaacaccttctctaccaaaaatacaaaaaaattaaggccgggtgaagtggctcacgtctgtaatcccagcactttgcgaggctgaggcgggcggatcatggggttagaagatcaagactgtcctggctaacatggtgaaaccccgtcactactaaaaacacaaaaattagccgggcgtggtggcacatgcctgtagtcccagctactcaagaggctgaggcaggagaatcgctttaaccccggaggcagaggttgcagtgagccaagatcgcaccactgcactccagcctgggcaatagagcgagactctgtctcaaaaaaaaaccaaaaacaaaaacaaaaaaatacaaaaatttagctgggctgtagtggcacacgccctgtaatcccagctactcgtgaggctgaggcaggagaattgctagaacccgggaggtagagatcttgccattgcactccagcctgggcaacagaactagactctgtctcaaaaaaaaaaaaaaaaaaaaaaaagtgttttttgagggggctgggcatggtggctcaagcctgtaatcccaggacttttgggaggcccaggtgggaggatcccttgtgcccacgagtttcagaccagcctgggcaacatagcgagaccctacaaaaaaacatgtttcaaaaaaaaatttttttttttgagatggagtctcgctctgtcgcccaggctggacagcagtggcactatctctgctcactgcaagctccgtctcccgggttcatgccattctcctgcctcagcctcccaagtagctgggattacaggcgcctgccaccacacccagctaatttttttttgtatttttagtagagatgggatttcaccgtgttcgccaggatggtctctattcctgacctcgagatccacccgcctcagcctcccaaagtgctgggattacaggcgtgagccaccgcgcccggcctcaaaaaaaaaattttttttttgagatggagtcttgctctgtcacccaggctggagtgctgtggtgtgatcttggctcactgcaacctctgcctcctgggttcaagcaattcccctgccttggcttcccaaatagctgggactataggcatgcaccaccacacccagctaatttttgtatttttagtagagacagggtttcaccatgttggccaggctggtctcgaactcctgacctaaggtgatccacctgcctcggtctcccaaagtgctgggattacagctgtaagccaccatgcctggtgtatttttcaaaaattagccagacatggtggtgcatgcctgtagtcccagctacttgggaggctgaggcaggaggatcctttgagcctaggaggtcaaagccacttccagctatgatatcgtcattgtgctccagcccaggtgacagaaccagaccctgtctctaaaaacaaacaacgaaaaaatccaaaaactttttttgaacacctactatgcatcaggcacaatctaagctgtctttttctttttcttttttttttttttttgagacggagtctctctgtcgcccaggctggagtgcagtggtgtaatctcagctcactgcaagctctgcctcccacgttcaagcgattttcctgcctcagcctcctgagtagctgggattacaggcgcgcgccaccactacgcccggctaatttttgtatttttagtagagacagggtttcaccatgttggtcaggctagtctggaactactgacctcgtgattcacctgcctcggtctcccaacgtgctggaattacaagcctgagccactgtgcctggcccggctggctgtcttttctcagtgtgacctagagctcgtcctctctcagtgcctgttttctgctctcttcacacccttgggcaggggtgggggcctcactccttcctcctacttatctcttccacccagcactgccctctgatccgggtcactcttggaggtgggggctaggtgcttcccccaggcctggttaccggcagagctgaggccgccttgccagggtgggtggaggccctctccgttgtgcccctgccctgagacttcggtgagaccttcctgggcaggcactggctgatgctatgggtgtcagcccttagcatgtcctccctgttaaagggggcacccctgccccgccctcaatgcctcctttgtcctgtgtccacccacagtgcttcagtttacccccaccctgcctttccactcagcccatcatgattcagaacagacacacacagggtatccgctgcaacccccactacacggcaccttcccccctcatccccaacagcataaggcacagcagctgggcctcctccccacagcctcctcctctgcccctcctccctcaaaagcaggaacacggagccctagagaaggaagccagtcccatgcaaacatgtaatgagcaaagatgagacggggaaatggcacaagagggcaggccagtgctcggtgctggagccaggggccaggtataacacccaaaaaggcaccagccaggtgcagtccctgccactaacagcacctcaccttttctgcctgtgccctccctacttaatgatctctctccgctcctactgacctcaaggtctctttcagagccttcagatgagatatttattttagtaggttggtgcaaaagtaattgctgtttttgccattgaaagtaatggcaggcagggcatggtggctcacgcctgtaatcccagcactttgggaggccgaggtgggcagatcacgaggtcaggagttcaagaccagcctggctaacatggtgaaaccctgtctctactaacaatacaaaaaaaattagccggacatggtggcacacccctgtagtctcagctacttgggaggctgaggcaggagaactgcttgaaccctgaagcggaggctgcagtgagctgaaatcacgccactgcactccagcctgggccacagagtgagactgtctcagaggaaaaaaaaaaaaaaaaagtaatggcaaaaactgcaattactttttctttttctttctgtttttttttttgtttgtttgtttgtttgtttgtttgtttgagacggagtctcactgtgtggcccaggctggagtgcagtggcgcaatcttggcttactgcagcctccgcctcccaggttcaagtgattctctcctgcctcagcctcccaataggattacaggcacccaccactatgcctggctaatttttgtatctttagcagagatggggtttcaccatgtttgccaggctggtctcgaactcctgatccacccacctcagcttcccaaagtgctgggattacaggcaggcatgagccatggtgcccgacatttttttttttttttctttttttttttgagacagagtctcactttgtcacccaggctggagtgcaaaggcaagatctcactgcagcctctgcctcctgggttaaagcgattctcccaccttagccccctgagtaggtgagattacaggcacatgccaccacacctgcctaatttttgtatttttaatagagagggggtttcaccattttgtccacgctggtctcgaactcctgacctcaagggattcgcccacctcagcctcccaaagtgctgggattacaggcatgagccaccacgcccgacctccttaactcttttatttccttgcacactttttctctgtagcccagctcacaacttaacatcctcttagacatacacctgaggttttttttttttttttttttgagagggagtctctctctgtcacccaggatggaatgcagtggtgtgctctcagctcactgcaaccttgcaaccactgcctcccaggttcaagcaattctcctgcctcagcctcccgagtagctgggactacagacacatgccgccacacctggctgattttttgttttttagtagagacagggtttcaccgtgttgcccaggctggtctcaaactcctgagttcaggcagtccgcctgccttagccttccaaaatgctgggattacaggcatgaggcaccgcgtcctgcctctgagttttttttttttttttttttttactgtctcctagaacatcagccccagtagagcagggatctttgttctgttcaccactgagggtcctcattgggtcctagcacacacagttgctcaataaatgttgaataagtgggtaaagacagccacgagcttgcagatatgtgttcaaggtgtgtccttgcagagagcttctctatacttggcactggagaggcctgtcgtgggcaaggacatagatgtggcgacctcagacttgagaactcctggggcagtaggggagatggatgtggataatgtaaccataagccttcctttctattttagactgagtggtcaaggaaggcttccagacaatggaaattctgataggttctaagagggagaccagcaaggagctgaaccggaggctgacacagggtgagagtgggaatgtctattttattttttttttggagacagggtctcactctgttgctcaggcagcagtgcagtggcacgatcgtggctcactgcagcttcaacttcccagactcaagtgatcctcccacctcagcctcccaagcagctgggaatataggtgcatgccaccacatccggctaatttttgtatttttggtagaaacggggtttcaccatgttgcccaggctggtcttgaactcctgggttcaagtgatcttgctgccttgggctcccaaagtgcttggattacaggtgtgagcctgtgagccacatctggcctattttattttttaattagttttttgtttttgtttttgttttgagatggagtctctgtctccaaggctggagtgcagtggcacgatctcggctcactgtaacctccacctcccaagtagctgggattacaggcacatgccaccacgcctggctaatttttgtatctttagtagagacagggtttccccatgttggccaggctggtctcgaactcctgacctccggtgatccacctgcctcagtttcccaaagtgctgggattataggaatgagccactctgcctggctgggcatgtgtcttgtttttttcattctgtagataacaagcaattgtcctccctcagcctcccaagtagctggtactacaggcgcctgccactacgcccggctattttttgtagttttagcagaggtggggtttcaccatgttaaccagtctctaactcctgacctcaggtgatcctcctgccttggcctcccaaagtgctggaattacaggtgtgagccaccaagcccagcctcaaactcctgagtttaagtgatcctcacacctcagcctccctgagtgctgggattacaggtgtgagccaccacacccggcctgagtcgggggaggtgtctattttagtctgagtggtcaaggaaggcttctctgaagagctgatgttggggccaggcctcctcaagcgattagaaggtgtcagccatggggagatgtggagggagggtgtttcaggccaaggaagggtaagatcaaataattcagggatctgagggcagaggaatctggactccagttctcccattcagggctgcccaggagagacaaagaggatctcataagggtgtgtggctttgtggctcactcacgcccacagcaaggaccatgcccaccctacttttttttttttccccaagtctccctctattacccaggctggagtacagtggtacgatcacggttcactgcagtcttgacctccagggctcaagtgatcctcccacctcagtgtcctgagtagctggcactacaggcatgcaccaccacccctggctcattttttgattttttggtagagacggggtctcactgtgttacccaggctggtctcaaactcctgggctcaagcgatcctcccacctctgccttctgaagtgttgggattacaggtgtgagccaccatgcccagcccgccaccagtcttgactctccatcctccctccctccctgtgagtgctggtggcctgtgtgtcccgcctgctgaaagatgcctctgacttggggcttttgacttcaggcccgggagacacattttggctggattagggagatcttaaaagggggtaggggacacagcaggggctaaggagagtgacacactgcaggcaggggttgggtgacagatgaaggatccactggtatatgctgccagtgtgtgccatctacttgtgtgttttacgtgtgtctggtgcatgtgtcctgtgtgggctgtatctgtgtgtgactcagctacgtgtcagcatatccctgtcgacgtgtgtctctgctgatgtgtctgtcagcacgcacggctgtcttgcatgtgtcttttttgagatagagtctcgctctgtcacccaggctggagtgcagtggcacgatcttggctcattgcaacctcaacctcccaggttcaagcgattctcctgcctgagcctcccaagtagctcggattacaggcacatgctaccacgcctggctaatttttgcatatttagtagagacggggtttcatcatgttggccaggctggtctcgatctcctgacctcaggtgatccacctgcatcagcctcccaaagtgctgggattacagaaatgagccactgtgcctggctagacatgtgtctttttttttcccttctgtatataacagggtctcactatgttgcccaggctggtctcaaactcgtggcctcaagcaatcctcctgcctcagcctcccaaagtgttgggattacaggcgtgagccactgcacccggcttgtgtgtgtctttctgtatctgttgtgtgtgtctgtgggtagtggctgtttccctgcatgggacattgtggtaaatgtggctaattccctgtgtgggggctgctgcctgtggataagactgtgtctctgtgcatgcgcacgtgtgtgcacgcccctcacaaccccaacgagaaaacacctgtccaccttcctgggctggcacaggggcacaggaggcgggatcccaaatcacaggctttttctctcggcatatctctgtactttattgtccctgctgtaacaatgctcatccttcctgagagcgtctcctgagggggcctcggccaaggctgactggagaaggggctggtgacccctagcaggctctgccacctgaggcctgggtcttcccccgggatccttgaatctggagatggcagagaggaggcaggccggctctttccccaatcctcctaggagagctgcttctgcccattctcccactggtgaaacggaggcagaagcagcagctcagcagggtgaagctgggtttaaccttcctgaatggggtccagggacactccacatctgccacatagcctcttgggctggacatttttcctgggcaccagccagcagctggagcagcgagtgccgtatttcttgtacctagggttgggggacaagaaactgccatttaggatgcagtgggggcccggaaaccgccacaaggaaaccacttttcccaagaggtaggtgttttgctttttgctttccccacaggccatcctggttacacgtggactgatttggggacccccgccccaactccctcctccattctaaggacctgatcccacaggcgttgcagagaggggtcccatcttcagcgtctctccagagcggggtcctctgggtccgacaggaagcacagcgccggggctctgaagggtcagaggtcaaagggcaggggtcagaggccaagcatgtgagctcgggatgcctgtgcggagtcgggcattttgtgggggtctcagtaaaggccccacctagctctggatcagccctgggagttgccagctctaagccacagcaaagccaggaagggagacagatggcagcattccgcagaggaggaagctgggggtgggggtgactcagcccaagtggaggggggtgctgcgactcctccctgagggctctaaatggggaagcaagatggagaaggggggggcagggagaaaggcagggaagacaggaaattggcccccaaaatatttatagctcttgggttttcaggactcacccagggcctcgctgcctgctgagtgggcctcggtgcctcctgggtgggctgcagggcccccaacagcatctgcaggggattcctgagaacggctactgcagggcaggctgtggggcagacaaggtattagcactgggggggatctgtagcttgtccccaacagccctccgaaatgaagatttagtatcaaggtatcagccatcccccgaggaggcaactaatatctgaatggcctggctttgcctctcattagtaatattattattattattattattatttttgcagatggagtctcgctctgttgcccaggctggagtgtagtggtgtcatctcagctcactacaacctccacctcccgggttcaagcaattcttgagcctcagcctcccaagcagctgggactacaggcgcgcgacaccacgcccagctaatttttgtatttttagtacagacggggtttcaccatgttggccaggctggtctcgaactcctgacctcaagtgatccacccacctcggcctcccaaagtgcagggattacaggcatgagctaccgtgcccgacctaattattattattattatttgaaaaatagtaagcacagggacagcctgccaggttccaatcccagttctccatgtccttgctgtgtgagcctggacacattatctcctactctgtgcctcagtttcctcatctgtaaaatgggcttcccaatacaacagtttttttttctttgaaaatttgatttattgatttttaaaaagagatgggagtctgggcaatatagggagaccccgtctctacaaacaaaaaaaatagccaggagtggtggtacaggcctgcactcccagctagttgggaggctgaggagggaggatggcttgggcctgggaggtccaggctgcagtgagccatgattgcgccactgcactccaccctgggtgacagagcaagaccctgtctcaaaaacaaacaaacaaacaaaagcaaaaaaaagcagccaggcatggtggcggctcactcctgtaatcccaacactttgggagggcaaggcagatggatcacctgaggtcaagagatcgagaccatcccggccaacatggcaaaaccccatctctactaaaaatacaaaaattagccaggcgtggtagcaggcacctgtaatcccagctactccagaggctgaggcaggagaatcgtttgaatccgggaggcagaggttgcagtgagccgagattgtgtcattgcactccagcctgaacgacagagtgcaactccatctcaaaaaaaaaaaaaaatattgttttggcggcatgattaaaaaagtcataattataatttttataataacaataaataggtaaaaattagagctgggggtcatactatgttgcccaggctggtcttgaactcctgggctcatgcaatcctcccaccttggcctcccaaagtgctgggattacaggtgtgagccaccaggcccagcttcccaaagcttttttttttttttttttaaggggatggagtcttgctctgtcacccaggctggagtgcagtggtgccatctctgctcagtgcaacctccacctcctgggttcaagcgattctcctgcctcagcctcccaagtagctgggattacaggtgcccattaccattcccagctagttttttttttttttttgagactgagtcccactctgtggctcaggctggagtgaggtggcgctatctctgcttactgaagacttcacctcctgagttcaagcgattctcctgcctcagcctcctgagcagctgggattacaggcacccactacaacgcccagctaattttttgtatttttagtagacatggggtttcactatgttggccaggctgatctcaaactcctgacttcaggtgatctgctcgccttggcctcccaaagtgatgggattataggcgtgagccactgtgcccggcctccccaggcttttgaatgagcccatacacataaaatactgcctgttaacctcttattgttgtcactaccaacaaatagtagctgttagcattattgggaaaaatcaccgcagccgcagctgcagcctaagcaaggccaggcctgattcctaaagagaccaggtctcacattgggagtggggagccactgagtcaggagcggcaggactgtatctggcaccagctcaagttgtcaaccagagactgggccacgtgtaacgtagagcacaggtgagggtccacaccgacgccagagagcacccctacctcccacactggtgtttgcgttgtaactgggagaaagggcggcctggccccagccggcccctacctgtacgtggggatgatctgcaggctggagtccggctttatctgaaacttcagagtcaccccctcgaacccagggtccactctctcggtgccccggcaggggttcagctgtttccggggccttctctggggtggggccgagggagtccccgggggctgcagacggcggcccttttggctgatcctggtctgtgtgtccttggaatccctgtccagcagcaggcggccctgagtccccagagccatcgggtcccagcaaggccccaggaccggggtgtcctgggcaggggactgacccagcctctccactgtctcttggaggaagcacagggcggtgaccgactcctggcatgcaggccagagggacctggggagaagggcagtggggtcacgttttcttgggtgactcctgggtttagccggccagggggttccaacttgggccggctctttgtgtacccttggacaggctacacaccccacctgaggttcagtcatttctaactctgggtggaaggtttaagagttgcagtaattgcaactcacctcgcccactgtgggcctcccaggcacgcccagccctccacatcaatcaaccccttacggcacccgtagatcacccaggcagggaccgccctaggtgaccgaggcaggatatcaagcctctggctgcaggatcgagaaaaaggttactttttttctttgtgtttcttttagagaccgagcctcactctgtacccccgcctggagtgcaggggcgtgatcaggactcagtgcagcctagaactcctgggctcgaccgatccttccgcctcagcctcccgagtagctgggacttacaggcacgcgccaccacgccgctggcttgccataatatgattacgatttttatcattttcattattattgagttgccctccataacccctggatgatccctggggagtgcctacatcagccccagagacatggaattgcatggcctctgatccctagatgaccccaagtgtctctgggcaccagaacctctttgtaagtttcagtaactattataaaattgccacttctcgataaccccagcaaagagaggtcatgaccccttgatcactgagccaggtggtgaagtgctagcggggtccggggaatggggtttggccttacgcacctctcactgattctgcagcatcctggggtcctcggcttctcctgggagggggatcctcccagccgctccaggttcagacagggcggcgccagaagctttgctggcattgaggagtccgggattggctcggcctccattgcgccccagcccagccccctccctaatttcacccggccctgtcccgctgggcccacccgatgaaacccacctgggaggggcgggacctgtgtggtgggagcgctcttggtagaggatgcgatgagccccagctgagagcgaccagcctcggcggcacctttcctctttctggcttttttcaggtcatccgcgcacccctgcgtggcaagggcggcctggaccccaccaaatccctccgcagctgccggggcggggccttccacgctagccctccccctcggaaatgggggctcccaggcctctgccttggatccccagcggcatcttagatcccagagggaaaagagaaccgggggcccagcacagcagatgcaggtgtggtttgtttttgtttttgttttttttttttttgagacagggcctcactctgtcacccaggctggagtggaatggcctgatcaccgctccactgcagcctaaatcccctgggctcaagtgatcctcccacctcagtctcccgagtagctgggactacaggcacttaccaccactccacgctaatttttactgtttttatagagacgaggtctcgccatgttgcccaggatggtcttaagctcctggcctcaagtgatcctcccatcttggcttcccaaagtgctaggattacaggtgtgagccacctgtagaccccagatctgtcccccaaggacactcaacatgctggggcctgtgttatcgatttattgcagctccaatatgagtccactcctactcaaaccctgattctcaggggcctggggaaggccaccccactaggggccctgtccccaccagagcctggacatgggactctctcccaagcaggggtgttgtccttcacaggggcttccacgtctctcccgggcctgtccgcactctgggcagggctggcacctggctattccctcaatctgggccctggggccatggcaatgtggaatggtccaggtgttcatgtcagtggggcttggggacatggccatccacgtagaagttcctggtgatcttgggcagggtgaattccgctccttccagctccggtgtcagcacaatctggcagcccagccgcgagttctcctggaggaggggggccatgtctagcatgtcgtcttccctagggtggtgacacgggcagtgttagccgagggcaagctagctgggtgggtggggggccagaggtgggggagggaggaagctgactgagcgcagggggtagtggtgggggaggcagctcccattccaggaactggaagtggggaggatggtgggggctgctgaatgctccagggtgaagctgccagctagacagggctgacccactcacctctcctcgggaggaggcaggagatccaggtggtcttcactcacatacacatggcaggtggagcaggccagggaggcttcacaggcccctaggggtgggaagtgaagggggcgcaggtgagtggcagagtcaggaaggggctgctatgcgaatggcgtagaggagtagacctctcttccaccacgtgcctcacgtctccctcctgggcctgcagctccactgtgtgtaccaggcactgtgtcatgtcctcaatgtcctcagctagctgttccccagtgtgtagggtttacaaacggacatctgggaggccccatttcccagggactccctagcaggctgagatgcagaaccattaaggagcagggacttggctgccaggtagctgagaggggaaaggccaggcaggctccccgcagtctgtgagcccttgctgtgaccctatcactgtgctgggctaatgtgtccccacctctccactgctcttggaggatggaccggctgactcagcagtcagtgtggtgggggaaggaatcaggcattaggattttgttttttttttttttgagatggagtcttgttctgttgcccaggctggagtgcagtggcacgatctcggctcactgcaagctctgcctcccgggttcacgccattctcctgcctcagcctcccaagtagctgggactacaggtgcctgccaccacgcctggctaatttttttatatttttttagtagagctggggtttcaccatgttagccaggatggtcttgatctcctgacctcatgatctgcccgcctcagcttcccaaagtgctgggattacaggcgtaagccactgcacccggccaggattttttttttttttttttgagacagggtctcactctgttgcccagcctggagtgccatggctcagtcatagcttactgcctcaacctcccggctcaagcgatcctcccaccccagcctcccgagtagctgggactacatgtgcgcaccaccacacctggctaatttttttttttttttttttttgaggtggagtttcgctctctttgcccaggctggagtgcaatggtatgatctcggctcaatgcaacctctgcctcccaggttcaagtgattctcctgcctcagcctcccaagtagctgggattacaggtgcccaccatcacgcccagctaattttgtatttttagtagagatggggttttgccatgctggccaggctggtcttgaactcctgacctcaggtgatccacctatctcggcctccctaagtgctgggattacaggtgtgagccaccgcacctggccatattttttttttttttttttttttttgtagagacgaggttcaccatgtggcccaggctggtctcaaactcctaagctcaagcaatctgcctgccttggcttcccaaaatgctgggactacaggcatatgccactgcaccagaccaggaattagggttgaaagagacagaacctgaagttttctgctgaccacctgcccttggtcacacccccacatcctctgatcacagagaccggtgcttggggatcatgtccctcctggcctaaaactttccaaagggttttcacactcagaataaaatccaaactccttcacttagtcttgcagttcccccatccccctcattcattcctttgttttcctttgtaatttttttcttagagatggagtcccgctctgttgcccaggctggactgcagtggcgtgatctcggctcactacaagctccgcttcccggattcacgccattctcctgcctccgcctcccagagcagctgggactacaggcgcctgccaccatgcctggctaattttgtttttgtatttttagtagagacagggtttcaccatgttagccaggatggtcttgatctcctgacctcgtgatccgctcgcctcagcctcccaaagtgctgggattacaggcgtgagccaccacaccttgccaggccacttacctctactagcccggcacagtggctcatgtctgtaatcccagcactttgggaggccaaggcaggcagatcaactgtggtcaggagtttgagaccaccctggccaacatggcgaaaccccatctctattaaaaatacaaaaacttagccgggcatggtggcagttgcctgtaatcccagctactcgggaggctaaggcaggagaatcacttgaaccctggaggtagaggttgcagtaagccaagatcatgccattgcagtccagcctgggtgatagagcgagactctgtctcagataaataaatgaacaaataaatctatctcacattccaatccctgtcctagactattggctgctggattccagaacagaactttaggtaggcctttcataacccctcccaacatatcttcccctttaatgataaaatcaggatccctgatatattcatcccaaaagcaaaccctatatattttcttccagacaacccttcccaagttggtcataattatgtatttacctgtgggattattgtccctattagaccgaaatggatgtgagatgacagaggccttatttgttttgtatattgctgcctgacgcgcagtaggtattcatagaaaggcagcacagattagtggctacaatggactggtgagtctagtattgtcactcacttgcccttagaccaggtctacttaacctggggtttagttgcctcatctataatagggaataacagtctctactactcaagttgtcatgaagattcagtcagtgaatatttattaacatggttaaagacatatatatatatatatatatatttttttttttttttttttttttttttttttttgagacagtctcactctgtcgcccaggctggagtgcagtggcgtgatcttggctcactgcaagctccacctcccgggttcatgccattctcctgcctcagcctcccgagtagctgggactacaggcgcccaccaccacgcccacctaattttttgtatttttattagagacggggtttcaccattttagccaggatggtctctatctcctgacctcgtgatccgcccgcctcggcctcccaaagtgctgggattacaggcgtgagccaccgcgcctggccttttttttttgtttgtttgagacagagtcccgctctgtcatgcagcctggagtgcagtggtgccatcttggctcactgcaacctctgcctcccaagttcaagtgattcttgtgcctcagcctcccaagtagctgggattatatgcatgtgccaccacgcccagctaatttttgtgtttcttgtagagacagggtttcgccatgttggccagactagtctcaaactcctgtcctcaagtgagtcgcctgcctcggcctcccaaagtgttgggattacaggcatgagccactgtgcctggacaagaaatttctattattatttttctctcaacaaattatcaaacatctgttacatcttgacaggcaacagataagcatgaataaggacatgggtcaccaatctcactgggggacagatgacaaagtaggaaacaaaacagcctggcattgtggcttgtgcctataatcccagctacttgggaggctgaggtgggaggatcacttgaacccaggagttcaaggctgcagtgaggtatgattgcatcatggcactccagcattggcgacacagcaaggctccgtctcttgaaaaaaaaaaagtgagaagtgctatatatcatatcacactgataagacagagtaactagggcatgggtacttcagctgggctgaggggaatgggattgttagggacatgacatttacactgaggtctgaaggatgagaaagagccagaatgtttgctgggaaagcacttcagacagagggaacagcaaatgtaaaggccccgaagcaggaatgagcttggttgtttgaggaaccacaagaaagccagtgtgggctgggcgcggtggctcatgcctgtaatcccagcattttgggaggctgaggcgggtggatcacctttcaggagtttgagaccagcctggccaatgtggtgaaaccccgtctctactaaaaatacaaaaattagctgggcttggtggtgggcgcctgtaatcccagctagtctggaggctggggcaggagaaacgcttgaacccgggaggtggaggttgcagtgagctgaggtgcagtaagccattgcactccagcctgggcaacaagagtgaaactccatctcaaaacaacaacaacaaaaagaaagccaatgtggctagaatacagggaggaagggggaagagaacacaaaatcctgggagccaggagtcctagtgatctctaataaatgcttaacaaataagagcttggcaacagatgaggccatggtgaggggtttggattttagtccatatttggtgggaaaaagacgtgaagagacacacctaatttgtgggtttttttttttttttttttggacaaatgtataaggacctccttaattccctctgcccggttcctaccttccaggtccaccccgtggcgctgggccaggtgaagaacattgtccccgactctgccactcactgggatccgctggcctgagcggtctacgaacaccacgttcaccctggggacagatggaagtgcgaatgccgaactggatgatgggctcagggcccgggtagaatctagggttaggaagtaggaattgaggcttgacgcacaggtactgaatagggcaaagcagaagggggacctcgagatgaagctacagggcaagatggggaccagaggaattccgtgggatgaggaatgggggacttggccccctgcactcacacgtccccgggccgctccgggccgcccgcgtcctcctctccagccgggcgcgagcctggaaaacacggttcggtgagcggctgcgccgagccccgccccgccggcatctgacggattaacgctgcccgccccgggcgccccaggtacctgtcgcttgaaactttctggttgtccccagcgccaccccctcccccgacccggaagtgcccccaggtctgttccaccaggtgcccctggcagcctgcagtagaaccctggcactcacgcctccccgggccatggaggcggccatgacatgcatcacgtgactcaccgactgagcatgcgccgcgccagggaggcgagggaaagcccataatcaatggaacataagcgcagatgtttgcttagggcctgcggtgaccaggtgggaagagcagggcggaatccatctcaggtaaacccgcggggccatcccagacctcccactcaagcccactgtttgtcccaagaaccagccaactctgatttctttaaaaccatttacttacaaactttaattcagcaaaggtccgtgtggggagactggggtggggtcgggggaatagtccccttggagtggatgtggacccccagagtcaagggagggaagctggtggcccagttggctgggggcaaggcccagggtcacctcaggtcgacaggtcctgctggtgggcgggcccagagtttatcttcatggagtgctggtttctggcactgggctggaaggaggccagctccagggatctggccgggggtgggcaggcagaattcaagaattcatcttcaacaagcgagtgacagcagaggctccgggagatgggcacaatgtccgactcccacagacagacagcaggggactggcagagaaagcccatctctgcacggaggcccgggtaggagggggtggtggggccggttcgccaagatgaaggctttccccttctactgtccccagggtggagatcctgggtagggtggcccaatccctaggccagagctgtttggtccatagtcaagctcccagagcttggcatctgtggctctggccagcagggcctggggcccagcttttaaggcatcagaaggggagggggctgcggcagggaccccgggccccacggctggggtataggccagatgggcaggcaggggcaggagacagccatgcctgcagcaaatgtgggaaaaacagctgtttcaaaccgcaaggtgtggaatggtggcccggacaggccgggccttgaaggaatcagagctgggggctgtccggggtggtttgaaaaataaaacttagaaaaggaaacagaagtcagttgtcaaagttaaaaaaaaaggagacagtctctgtatcttcacgggaggtcagggaaacctccaaggcactcgaaaggccaaaattacaggagcaatgaggcaggagggctccggagagacgggcacagcggaggaggagatggggggagggagggagagcaggccggggcccctctctcttaaggctgcagggtttcagcgtggggagcaagccagagacataatgaggcctccagactcccccacaccccttgggctcctggggctccggctgattggtcagtaaagtctttcagagatttttctattaccgaaagagagaaaatggtttaaaaaaaacacaaaacaaaacatcagaaaacccaaaagcgatttggtgcaggcccttgagttatctctggtgccagccacttagaaaatcctcttccgcttcaggtaggagtccgcgtagtggccgccgaggccctgggagtgctggcccacatagctgccttctgggctgggctcgggcgagggcagcaggtgggcaaagctgcgtttctggccgcccagtggggtctggagacagagggcagggcggggcgggtcaggggccgctggggggccggggcttcccagccctgcatgtccccaccccctgcccgtaccttcagcaggtggctgtgaccattaggcccggggctgaggcccaggagcccttctccggaccccagcggggaagagccgattgcctgggagaaatggagaggtggaacaggtcactccctgggggccagaggaagcacccaccccgcccccctgccactgccccccagccctgagggaaagcgaacagtttcaggttcaaatcttgcttctgctactttctagctataagacctagggccaattgctccattttatttgagcctcggttttctcatctgtcagatggggccagtagcacccacagcctgggctgtagagagaggaagtgacagaaagcccggaatgctggcagtgctaggtgcttgatgcagagtggatggaggacaataggctgttgctactccaccctgagcaagaccaacccctgccaccaccccagctttggcctgggcaccgagggttacagagccccggtggcaggcacccccaaatcctagctgtcccagggggcctgtgcttggccagagaggttcctcaccttactgaggtggctctgcttgaggccagcctgcaggccgctggtgaagtaggaagtgggcgagcctgaatagaagtgagacagggggcccccgccactcccaccgctgctccgttcgccgaagccactgggcgggggggacatctgtagaagaagggccggtggagtgaagcagacaattgtagtacccagccctttgtatacaatcttccctctgcctcccaggttcaagcgattctcctgcctcagcctcccgagtagctgggattacaggcatgcgccaccatgcccagctaattttttgtatttttagtagagacggggtttctccatgttggtcagactggtctcacactcacgacctcaggtgatccgcccacctcggcctcccaaagtgctgggattacaggcgtgagccaccatgcccggcagttctgggctttgcaaagactagctttggctaataggactgaggagagctggcacgtgggtacccgcctcctcttcctcctccaggaacccagggatcatcaccgcacgaatgggcacacagaaactgttccagcctgtggacgccaaatatgtgaggccacatagctcactgagacccaggtgagtgccggggaccgcccactgccccatagagtggcaagaagtaatacaatgcctggcatggtatggtggctcatgcctgtgatcctagcactttgggaggccaaagtgggaggattgcttgagcccaggagtttgaggccacagtgagctatcatggagccactgcactccagcctgggcaacacagtgagatcctgtcttaaaaaaacccacaaagaacacacaaaatacaaggtctgctgttccaggctactaagtcatggcacagcctgtcatgtagtaaaagctgattgctacacatgccataccaggtggctcttaccttgtgtcggctgggtccgtgaggcccaagggctggttcccgtgggtgggagaagagccgccgaggtcccatgtcctgaatgaaagcgggagaagcacattgggttggagtctgtcccagcctcacccctggctgaactccatggcagagctgtcatcagggaagacagtccccaccactctgggaccaggaagaggcaaatttggggctggatgcagcttggcagggatggctgctgtgaaggggggtgccccccatgggcctaagtgtttggagtttcccaggcaagctgggaattcgagctgtgtggactcttgcagttttcctgtgttggcgttagttcctgttgttatttgtttgaaacacagagggggccaaacatcacccaggtgacctgtgggcggccagtttgcaatttctttcttttttttttttaaacggagttttgctcttgttgcccaggctggagtgtaatggcacaatcttggctcaccacaacctccgcctcccaggttcaagtgattctcctgcctcagcctccctagtaactgggattacaggcatgtctaccacacctggctaattttgtatttttagtataaaacataaattatattttatattatatatgaaatatatattttattatatattttataatatataatttctccatgttggtcaggctggtcttgaactcttgacctcaggtgatctgcccgcctcggcctcccaaagtgctgggattataggcatgagccaccgtgcctggcccagtttgcaatttctgacctgccaaggaggttggcatcatagaaggaccaaatctccaggggcacagacaggaatcaaaggtgggagagagggatagaaagggcaagccctgtctctggggagagacagtgtggcctaagtcctcttgggagagaaagacagacgcaggatgacagacagactgagacccaagatcctccagggctcgagaatggacagacaggcaggtggaccggaagcagggggtgatgtgcagacagacgggaaactttaagggcatgaggctgggcgcggtggctcttgcctgtaatcccagtactttgggaggctgaggcgggtggctcacttgaggtcaggagtttgagaccagcctggacaacacaatgagactccgtctctaccacaaatttaaaaattagctgggcatggaggtgcgtgcctgtggtcccagctcctcaggagactgaggtgtgaggatcgcttgagcccaagaggttgaggctgcagtgagctatgatcgcaccactgcactccagccagggcagcagagggagaccctgtctctaaaaaaaaaaaaaaaaaaaagcagagaccatatctggcacgttccctgccgcctccctagcacatggcctggcatagtcaatcctagagaaatatcagtttggagaatgatttggccttaggggacagagagctgcagccaggcactcaccgaggggtagtcgaagctgtagctgtcagacagtcctggttcggggggcaggcgggcgctgctgagggggctgagcaggcgggacttgagctggaaggctttgctgctgctgctgccacctccaggggctggggggttagttggggggccctcagctgggcggcggcttctcccggcgcctccccagccccgggcctccttacccgccaggttgctggccgggagcaggctgtgtaggttcaggtagggattcaggggaatccggtagtccttggggggctcccccagcagtgagacctgtggcgggaaggcaggattcgagagggcccccgggagagggaaccctgcggaacaggaggctggtgtggtgccgcgcgcagggcagggccttaccccagggggcgtcggcagaggcccactgtctttctggaggcctctgaggccagagcctcggagccccacaggggcggggggaggagtgagctgggccgctgggggacccaagcccagggcctcccggtcacccccagcagggccaagcacggatggcagcaggggtggtggcttccctcgccggggcggcagctccgggggcaggccccctcctagggagggaaggaggatttcaggggcccaggctcacaggacccctctccccagggccctccagctcccacctggaccagggcccaggggtcaagagacaaatccatgctggccactgagcagagctcatccctgggccctgagtggagggcacccaactgatggacaagggcgctgggacccagaggttgggtcactcacccgaggccacgtagcagggaaggaaggggaagtggctgggggacaccgtgtgggcagggtctgcgttacctgcaggcagctccccgaggagggggttggctggctgggccccaggctggagggcgcccaggggtgagtctcccaggatgccgggcttctagggacagagcacagacagttgcagatgggggcagggtggcccagggaagcagacaggtgtggcccagagtcttggcagacacaccccaactccagggcacggccgatcctgggcagacaggcacagggttccccagtgcccgccacactccaactctatcactgtcccatcagccatggtgaccgagggtctcctgagctccaggccccagttccctggccaatgattgcagcacagtatcaactgcagccacatggaatgggacagccacacagtgtttcagccacttttagtcacagaaggccagacccacaggctcacatattctgtcagttaccaccagacagacacacctgacttagaatccagggaaccacaccagacaggacggagcatgggtgtatgtctatgtgtgtgtgtgtctgtgtgtgtgtgtgcgtgtatatctgtgtctttgtttctgtgtgcatgagtctgtcttgtgtctatatgtgtgtctgtgtctatgtgtgtgtctttgtcttatgtctttgtgtgtctatgtctctgtgtgtatatttgcatctttgtatgtgtgagtctatatgtatacctgtgtttctaggtgtgcgtgtgtgtgtgtgcacacactgaggggatagacctggagttttttcccaggcatgtctatagagcttccgagcagagtctattcacaaactggtgcccagcagcggcgctcccagcccacacccagtttcaggctgtaaatgggcgtgtccaggtcccctgaccccaccccaggcaccaagtccaggggcgctctcagaatggagggaaagatggcgaaccatcatgagcaattgccagagggggatggggatgtgggtgggaaaggcaggggtttgggggagtcgccctcaccctggttctgcgcccccagggcacagccagaggtccccccaccccaccgatcgcaccagctgtgttgaaaagagcctgtaggggctgtagagcagtgggtgagggggatgcgtgtgttaccttctggccctgggtctgcagggcgagctgcaacagcgccgtggacagggctggcccattgagcagcggcatggctgggggggcacccaggaggcctggagggagacataggaggatgtgtgggggtccctgtgtcctccctgccccacctcacgaaacacagccctgaacccattgatggggcaggaaactgacactctggggccggggggtgggcagtggacttgcccaaaggaagggcctagaaggggcagaggctactccagtgaaggtcagccccctcttgtcagcaccccacctcactgcaggctgctgtgtggccctggtcccggcccccagttgtggacagcagcagcccccgctatgactccatactccccctcggccctactcctggggctcctgtcactgcagccaagatgagcagtttcgggaagtgccgggggcagcgctgcagcccctgttctgcacagtggggcccctgtccagccccaccttaccctgcttcccccccgcactgccatggagcagggggttgagcagcagctggagggacgcggatgggcccaggttgttgagcagctgcaggatgttgggctcggggaggagtcccttcccccgattgagggcctgcaggaaggaacagaagcagctcagagtgccgctggggccctgacatccccatggggctcccatccccaccccgccacctctgcccgcacaggctcaccgtggcctgggcagcgatgagagcggccagcatactgcggccggggggcccaggggcgcagaaggagactcgcaggtggctgccccccagggacaggccgtccgcctgctgctgtgcctcctccgccatctcagccgtctcatactccagcaccgcgaagcccttcagctgcccatcctggccgcacgccagctgccggaggaaggcaggcagtcatgagcatctgggcagcagtgactgcaccaccccgggaagtgacaaccgtaaccagactcagctgccccataagggtgaactccacgccaggcctccactgccctgtgcctcattcctgcatcagctcatctgattttcccaatgaccctgggaggctgcatcatacccatttctcagagaaggcaactgaggcacggagaggtcagcgcacccaaggccacacagctggagggagggcggagctgggagccacctcaccaacaaagccaaggccacgggcggatgcggtggctcacacctgtaatcccagcactttgggaggccgaggcgggcagataacctgaggtcgggagttcgagaccagcctgaccaacatggagaaaccccgtctctactaaaaatacaaaattagccaggcgtggtggcacatgcctgtattcccagctacttgggaggctgaggcagaggcaagagagtcacttgaacctgtgaggcagaggttgcggtgggccgagatcgcgccactgcactccagcctgggcaacaagagcaaaactccatctcaaaaaaaaaaaaaaaaaagagataatcagcaacgggtggggaaggaagggctctcgttccagacagtggccaagccaggtagcagtgctaagggaagtggttgggctgggcaccggcacttgctgaatgcccgggcagcaaaggtgcaggtagcagcccttcacctctgcccacgccctgtgccaaggtctgggcacagatctcccataaccaaacctgtcggcttttgttttgttttgttttttttgagacagagtcttgctctgtcaccccggagtgcagtgatgtgaacttagcttaccgtaacctccacctcctgggttcaagtgattctcctgcctcagcctcctggtagctgggattacaggtgtgcaccaccacgcccagctaatttttgtatttttagtagaaatgaggtttcaccatgtcggcaaggctggtcttgaactcctgacctcaagcgatccgcctgccttggcctcccaaagtgctggattacaggcgtgagccactgtgcccggccataaacacacccatcttagggatgaacagagagagactcagaggggtcacagagtgatcaaggccacacaattcctaagtcgagggactgatgtgtgaacctcaagctgcttcactgtcaagcccaccctccattcagctgggtcacctaacattaaaggtgggctcctcggaggacatcacttcaacgcctgctactcatcagatgctcaacaaatgtttggtgagaccaggcccagtggctcgaatctataatcccagctctttgggaggcaaaggcaggaggatcgtttgagcacaggagtttcagaccagcctgggcaacatagggagaccccatcttcacataattttttttttttttgagggagtctcgctctgttgcccaggctggagtgcggtggcatgatcttggctcactgcaacctccacctccctggttcaatcaattctcctgcctcagcttcccgagtagctgggattaaaggcacctaccaccacgcctggctaattttttttctatttttaatagagacagggtttttgttttttgttttgttttttttgagacggagtctcgctctgccacccagactggaatgcagtagtgggatcttggctcaccacaacctctgtctcccaggttcaggtgattcttctgcctcagcctcccaaatagctgggaccacaggcacatgccaccacacccagctaatttttttttttgtatttttaatggagatagggtttcaccatgttagccaggatggcctcgatctccagacctcgtgatgcacccacctcggcctcccaaagtgctgggattacaggcgtgagccaccgtgccatgagacagggttttaccatgttggccaggctggtttcgaactcctgacctcaagtgatctgcccgccgcagcctcccaaagtgctgggattacaggcatgagccactgtgcccggcctctacataaaattttaaaaatcagctgggcatggtgatgcattcctgtagttccccagctacatgggaggccaaggtaggaggatttcttgaacccaggaggtcgaggccggagtgtactcctccagcctgggtgattgagaacctgtctcaaaaaaaaaaaaaattaagtttagtgaatgttcgagtggaggaatgaatgggcagctgttcacaacaacctgatcatgaagcactgccagccccattttgagatgtggaaacaggctaggagagtacctgtagctggtcatgaccctgtgacctttgatctccacataagaaggtaaggccaggccagcgcagtggctcacacctgtaatctcagcacttggggaggccgaggcaggtgtatcacctgaagtcaggagttcaagaccagcctggccaacacggcgaaaccccatctctattaaaaacacaaaaattagctgggtgtggtgtcaggcgctgtcatcccagctactcgggaggctgaagctggagaatcacttgaacccaggaggcggaggatgcagtgagccaagatcgcgcccctgcactccagactgggtgacagagcaagactctgtcttaaaaaaatataaaataaaataaaagaaaggtgaggccattgtgctaactcatcttctgtcctgagcccgcacaggcggcctggtacatagcaggcctggtacgtagcaggtgtccaagagaaagcagcagaatggatgaatgataagtaaacagagagggggttcccgtggctcatggatactcagtttttgttttttttgtttctttgagacggagtctcgctctgtcgcccaggctggagtgcagcggcacgatctccactaaccgcaaccgcagtcttctgggttcaagcaattctcctgtctcagcctcctgagtagctgagattacaggcgcgtggcgccatgcctggctacctttttttttttgttgtatttttagtagagacgggatttctccatgtttgtcaggctggtctcaaactcctgacctcaggtgatccgtccgtctcggcctccaaagagctggcattacaagcgtgagccactgcgcctggcctgtttttttttttttttttttttctgtttttgagatgcagtgttgctttgtcacccaggctggagtacagtggcgtgatctcagctcactgcaacctccacctcccaggtacaagcgattctcctgcctcagcctcctgagtagctgggattacaggcctgcaccaccacacctggctaattttttttgtatttttagtagagacagggtttcaccatgttggccaggctggtcttgaactcttgacctcaagtgatccacctgcctcggcctctcaaagtgctgggattacatgcatgagccacctcacccagcctgtttcttgttttaaatatagagatggtgtcccactatcttgcccaggctagtcttgaactcctggtctcgagtgatcctcctgcctctgcctcccaacagacacctagtttaaatggggcaccaataccccacttacacgagagggacccactcaagcccacagagctgggggtccgagcccaggactgtctctctgtttttgagataagggtctagctctgttgctcaggctgtagtgtcatggtgctgtggtgcgatcatggctcactgcagcctcggactcccagaatcaggcaatcctcccacctcagcctcctgagtagctgggactacaggcacaccatcatacctatctaatttttgtatagagaggatttcaccatattgcccaggctggtctcgaactcctgggctcgagggatccgcccgcctcagcctcccaaagtgttagggttacaggtgtgagtcactgcacctggccaggcctaccccttttaagcctctgcactggcctccgctcactggcccaagctctggagctaggctgcggtgttctgatcccagctctgccagaccctggctgtttaactctaggcaagttacttgacccctctgtgccttggtatcctcacctgaaaatgggagtgatacctgcctctcagggttgctacaggatgaagcaactgaaggttacgtactcagagtccacagcgagtgctgggggaatgtcccctttgggatctctggggatcaagaccttctgggggctcttagagagtgagtctggcctgttctcgccccactgcacctgttacagggcgaggcacacacacagaagtgcctggcatgtgtggcttgaatgaacaagggactgttttgccaacccattgtgcaagtattgagtccctgcttatggaggagggaaactgcagatcagagagccagtgactggcccgagctcgagggcggggctgggatctggcaaagcctcagtctctgacctcaaggctcaaatagactgtgggctcctctgcagcctcctcaatgcctggtccaggtctgggaccccatgggaggtttgacgagggtaccagcgaatgaggaggtgagtggtgagcaagcctcgagatccatagttacaagagtggccttgcatgcatctgatagagggacagtgaggcctgaggctgcagagggattcaaatcccctggccaggtgtggtggctcacgcatgtaatcccagcactttgggaggatcacctgaggccaggagttcaagactatcctggccaacatggcaaaaccccatctctactaaaaatataaaaattatccaggcatgggggcggggcgcctataatcccagctactctggaggttaaggcaagagaattgcttgaaccaaagaggcggaggttgcagtgaactgagattgtatcactgcactccagcatgggtgacaaagtgagactgtctcaaaaaaaaaaaagaaaaggcagatgactccaaagactctctcaggtgctccgggcctggcacctgctccccaatgctctccacagggctcacctggcagaaggtggggctgtggacagctgacagcgcccggcacagagcgtccacatcgttgaagccaggtggcaggcggtccacacagaggcagcgggagtggagaagggcaggcgtcagttgcccggcatccgtccagtgcacgtagagggtgcgtggtcccagcggcttgcccagcaggtccgacttggcacgggcagccgagtccttcttcatgtactcagcaaagccatagcccttggattggccagtgcgctcactgtagaccaggaagcagcgctccaggctgccgaagggccgcaccagctcctcgaactgctgctgtgtgaggctggggggcaggttggccacacacagcagggcatccgtgggctgcagctgcaccgacagttcacgctcccgcaggcggctctggtggaaagcattgattgcggcctcggcctgctccccattcagcagggtcacgaaggctgcggtgggaggagggcagtgcgaggtcagccgggccctgagggcctgcccctccaccccgccaccctgcaaaccaggtgggacctccaaatgctgggcatctcaggtgcctgctgatctgagcagttgccagccttggcgactcacacaggcgagagcgcctgccattgactctaggctccacgaagcccactccctctcccagccctgcgtccacctgcacccacagcagcgctcaccaactgtgggcctggctctgtcctaagaacgctgtgggtcactcgggtgataccaagggcagtggttaagcccatgctcactggggcccagatttaagccccaagccccaggtggctttgggggtatcagtttcctcatctctcaaatggatataacttaatcatcacaatcaccattttgccagagaggaaacgggcccagagcagcacccctgtgccccgagtaggggagcctggacttgaacccaggcagccggactccagaggcccactctacacactgcccacccctgccacctttccaggccaccagtgcccctgaaccctgctgccacgtgctgccccagatttgcgatccacccagcggccgcaggaagctttgttcaaaacgatcacgccacatccatcttgtggcttctagctgcagggtgcagtgcagcctgtgcgggctcgctgacctcccctcccatctcaccgctgccacccggaccacgccaggcacactccagaggggcctttgcagctgctgtttcttgagcatggaacactgagccccacctcctcacctggttaacctggacccacccaggtagaaaccctgtctctactaaaaatacaaaaattagccgggcatggtggcacatgcctgtaatcccagctactcgggaggctgaagcaggggaatgggctgaacccaggaggcggaggttgcagcgagccgagctcgcgccactgcactccagcctggcgacagagcaagactccatctcaaaaaaaaaaaaaaaaagaccacacaagcaggggtgactggctgagtgaggcaagaggggtaagaagagaatgaacccacggccaaacgttgtcaagaattagctcaatgccaagcgagtggagtaggaagagaatcagcccgatgcccagtgttctccaaggagaacatgaaggctgtcccaagatgacaggatgacaggcagattggggcaacctgccatgttggcctggggggcaatactgggcctgaagctcagagcagcagacagtgagccaggccctcccatcttcagggatggtcactccctgccctggcccgccccatggccccacaaacctgtccctttgtatttgtccacaaaacagtatttgagctcatagtcactgagcaggtcatgtacttcctgtggagatacaagacaaaagacagggagttactggagatggaagggggcaacccagtgccgcttcatagctgccaccagctatgaaggcaggtcaattaccaccccccattttaccaatgaggaaactgaggctcgatgcagtaattttgtcaaggtcattctgctcatacctggcagagatgggattcagaacctagctgcagactgtgctattacccaggcaacatgctcttagagggtatacctttagctggctgggcggggtggctcacgcttataatcccagcattttgggaggccgaggcgggtgaatcacctgaggtcaggagttcgagaccagcctggccaacatggtgaaaccttgtctctactaaaaatacaaaaattagccaggagtggtggcgcacacctgtaatcctagctactcgggaggctgaggtaggagaactgcttgcacccaggaggcagaggttgcagtgtgccactgcactccagcctgggtgacaaagggagacactgtcaacaacaataacaacaaggccgggcgcggtggctcacgcctgtaatcccagcactttgggaggccgaggcgggtggatcacgaggtcaggagatcgagaccatcctggctaacaaggtgaaaccccgtctctactaaaaatacaaaaaaattagccgggcgcggtggcaggcgcctgtattcccagctactcgggaggctgaggcaggagaatggcgtgaacccgggaagcagagcttgcagtgagccgagattgcgccactgcagtccgcagtccagcctgggcgacagagcgagactccgtctcaaaaaaaaaaaaaaaaaaaaaaaaaaataacaacaacaaaaaaaaaaaaaaaaaaagaggccgggctcacgcctgtaattccagcactttggaggctgaggcaggcgggtcacaagatcaagagatcgagaccatcctggccaggaaggtgaaaccccatctctactaaaaatacaaaaatcagctggctgtggtggcgtgcacctgtagtcctagctactcgggagactgaggcaagacaattgcttgaacccgaggggtgaaggttgcagtgagcagacatcaagccactgcactctagcctggcgacagagtgagactccgtctcaaaaaaaaaaaaaaaaaaaaaaagagtatgcctttagggaagccatttaacctgcatgaacctccttttgcaagattcactgtttccaacaactctgtaagtgaagtattaacaaactcatgttgtatatgagaaaacttaggctaggagaagtgaagagatctgctggaggccatgcagttgggcagcgcagccacccatgggtacctgactggggagcccaccttctagtaagccccacgttgtgtgggttcacatgcctcccaatttcctcctgctgataaagctgccctcttccaagccagctcatttatttttcttttttttagagatagtgtcttgttctgtcacctaggctagagtgtagtagcacaatcatagctcactgcagcctcaacctcctaggctcaagtgatcctcccacctcagcctcctgcgtagctgggactacaggcacgcaccaccatgcctggctaatttttaaaaattttttgtagagatgagggtttcactataccgcccaggctagtctcgaacccttgggctcaatacagcctcttgcctcagcctctcaaagtgctgggattaaagggatgagccaccatgcccagcctctcaagccagctttgaaggcaaagtgctggcgcctgctgggaccagacacactgtgcatcttgcaggagagacaatgtgttcccagctgagagactgcagacactgagaggaagacccagaaagaaacctgaccatccttaatgatccctgtcccgatctgtccccaaattcagcccctcccaacatccctggggttccactagccacgtgcccacccggtgtgctggtgggccggagagcagggaatctcagcagcaggaagcgagaacctatttcaccgccatagggcagggcagtatagatgccatttccctgggtccaaagagcattgggaagcgctgccccatgctggccccatgagaagggcactcctagcaggaagattagccacgaggggctccatagaacacaggcctcgcttccttcctgtaggtctgtaggctggtggcagaagaccccattttcccaaattaatcctgaggttttgggggctgagacccaggggctgctgttaacttccggatttatctctgagagcagtgaataaacgcgtgatatggaggggcgtactctccgcagtcctgaaacttctggatgtgaggtcccgccaccctgtggtagagtgggtggagaaaagcatcatccaagcagggggcaactggtggtccaatgtaccagcccattcacaattccccaacaggaccaaagctgtccgcccccttccattccccgcccgcttccatcacttggtgtcgcccaagcctgtggtcgcccctagcaacgccctccctcacttcgcagtcggtttcccctttcatcatcgcccccccacgtcccgctcttggtctctcccgatcccgcgtggatccggtgcttgggcgcccccgccaacgacccccgcgcacctcagcgttggtgtcgcccggttccccccgcgcacgcgcaccgtggtatttcccgccacgctcctacaccgccccccccaatacctggttggtcacgtcccccgggaggccccggatcagtatcttgcggcggttacggaactggcgctcggtgtgttccaggcgtttccggatctcttctggatctagaggcggcagctcttcttccggcgcccggcgctccgcggcatcgccggcttcgacttcggccccagacttagggctcagcgggggccggtgagtaacggacacgtccgccgccatcttgggaaacccggcgccttctgggaccagcgagccggggcggagcggcatagagcggcaacgagggcgcgcccgtcgattggctgggagaaaccccacctccttcccgccccccttgccccgttggctaagccccagcccacctctcaagagttcaagctgcgtctgcgcgccacaggccccgcccccttccgtcgcagcgacgctactcagtggatgtgcacctgggtgggagagacttgcagcgcgggtggaatcaaaccacagattagggagtttgaaggctttattggtgcggaatctgagggcacagccaagcccccgccaactttgatcccggatcccagcgtcactcagctctggacggttcttcccccattgcttctgtcggctgcatagacgtgaggggcagataggtgctctcctccctaacatggtaactgccgctccgttggtgctccctgaagacgtacattaaggccagtacgatagtcaccacgcccagggtcagtaacaccgccacgaagacggggacaaagtgggagctcccagctgtgcagagaaagcgctaagtcaatatgcgtcccttctgtctccaacccccccgccccccggcttaccggtccagacccgcagccccgtgttagctcaccctcaatgtccatcaccacgaccagggtgtatttgcctcgtgagctggacgcttggcactgataagtaccattatgtgttacgttgacgaagaacgggatccccaccggcacctcccggctggagccttccttcaaacaccgcagctcggggtacgggttgcccctggcttggcactgcaggacgtgtctcgttttatctttccatttcaagtgctgggggcatgtggctcggtcaattttgggaccatctgtggaaccaccatgtgtgatcagacacccaacacacccgaggcacagtggtgcagaggagcgtctaatctttccagggcaggggtggagggattaaaggtcagggtgaccgactcacacaggactcgcagctggacgctactgttcctgtgcaagaactcgccgtccacctcgagagtggcactgcagaagaagctgcgtccgtcgtcactctcggtagcatttagctgaagttgagctggctgccccggggccgcggccggaactccgtccagcgtgacctggactcgagccccagccatgcaactcacggtcactgtggacccctcatgggcggtgggctcgctgaggttcacaatgggtcctaggaagcctaaaggcggggcattgcccaggagcttaatgaacaggaccttcctgtgggtcaagccgctccctccgccctcccctttcctctcgggatatccgggccacgctttcggccgttcaagcctcgccctctttccgcgctgtgtccagcttcgggcactcaggcccaacccacgttgcaactgctattggggcaagccaggccccaccttttcggctagtctccgccccctctgccacgcccccagactgctgaggccgcgcccccttcccacgcctcctcttactaaagaccgtcaagttctcccgggcctcccgtctctcgccccctagggtcacgttgcagacgatctcccgggcaccctcctgatccgcgcgcgccgtggctgtggctgtggccgttagcgtgtccccgtggttcatgactgtcgcattcagcatctggtcccccagcgccaggtagacctgggcctctgaggctggaaaaagcccgtctagggtgcagtccaccggccacgacgtttccacctccaagaaccggggggccacgaggcgcgggggggtcacgggcaggactggggagaaaggtgggcatagtacaacccccaggactgtgccttccccaggacaccctcatcccccccagtcaggatatcttgctgactgggtcacccttcttcacaggacacacacacagggccatgaaaacggccttcttcaaagatcccacggctcgggcctcccttccggggccaccttgcccagtggccgggggctttccttcccagaagcctgtgaggtccggggtaccccactctcaggaaccccaaggtcagggcaccgtctaccctggctcagctcgtcacccaccgtctgaagccccttctctcaccaaaggttcggagctggcggggggctgaggtgttcacgaacagtcccagcccctggggctgcatgtccagttctgtgcggcatgagaaaggggctccgtggtcgtctctgctggccagcacagtggcagtgacctccgctggctcctccactgcgggctgccggctcagctcctcctcccagcgaagcagcaccaccgtgaggctggtccggggcgacccatcctccacttggcagcgcagggtgaagttctggcccaccggctgccaaggaggcaggggtgccagctccacacgctccgggagccctgagagaggaggggaggatggcacttagcgggtcctgcaaacccacccactcaccccagggactggggaggagacagggtggtcctgccgagaactgtgagctttgagttaataaacttagagggcttagagctgggccagtcgaagcgtttgctattatcattagcgcagtgattatcatttcctgtgttgtcagataccttgcaaggcgctaaacaaaactttctgttctcaaagatggcacaataaaaaaaaatgaggatggaagggatgaacgtttatgactatgatatgaatattaaaaattcctgtttatggccagacgtggtggctcacgcctgtaatcccagagctttgggaggccggggtgggtggatcaaaaggtcaggattattcagttctctccaatcaggttcagacactcagggctttcctggttcaccagccctgtggcagcctctcaagatactccggcacagtcacaggagacttgacactcccaggctgggtgccctccccagtacacctacaaaacgctgggcctcaggccgggcactgtggctcatgcctgtaatcccagcactttgggaggccaaggtggacggatcacctgagaccaggagttcaagaccagccttgccaacatggtgaaaccccatctctactaaaaatacaaaaattagccaggcatggtagcacgtgcctgtaatcccagctactcaggaggctgaggcacaagaatcgcttgaacccaggaggcaaaatttgcagtgagctgagatagtgccactgcactccagcctggcgacagagagagactctatgtcaaaaaaaaaaaaaaaaaaaaaaaggctgggcaaggtgactcatgcctgtaatcccaccactttgggaggccgagggaggcggatcacttgaggtcaggagtttgagaccaacctggcccatatggcaaaaccctgtctctactaaaaatacaaaaattagccgggcatggtgtcacacgcctgtaatcccagctactaaggaggctaagacaggagaatcacttgaacccaggaggcggaggttgcaatgagctgacatcgcgccattgtactccagcatgggggacaatagcaagactgcgtctcaaagaaaagaaaagtcaaaaagtaggccaggcatggtggctcacgcttataatcccagcactttgggaggccaaggcgggcagatcatttgaggccaggagtttgagaccagcctgggcaacatggtgaaatcctgtccctactaaaaatacaaaaattagctgggcgtgttggcatgcgcctgtaatcccagctactcaggaggctgaggcaggagaatcgcttgaacccggaaggcagaggttgcagtgagccaagattgcgccactgcactctagcctgggggacagagtgagactctgtctcaaaaaaaaaaaaaaagaaaagaaaagaaaaaaaaaagtagccaggcctgcaatcccagctactggagagactgaagtgggaggattgcctgagcccaggagtttgagaccaacctaggcaacatagggagatcctgtctctaaaataaaggtataaaaaagtgtaaatgtaaaacctccatttgcctactgctgactgaaaggggtacccccttttttgcttaagagacaagggtcttgcttttttgcacaggctggagtgcagtggtgcaattatagctcactacagccttgaactcctgggctcaagcgattctcccaccttggtcccccaagtagctgggacttcaggcatgtgccaccatgcccagctaatattttttatttatttttgtagagacggggtgtccctatattgctctgcctggtcttaaatttccggactcaagcaatcctcctgccttggcctcccaaagtgttgggattattgttggggccaggcgcagtggctcacacttgtaatcccagcactttgagaggctgatgtgggcggaacaccccgtctctactaaaaatacaaaacttagctgggcattagctggacctgggaggcagaggtcgcagtgagccgagattgcaccactgcactccagcctgggctacagagtaagagacgccatctcaaaaaaaaaaaaaagcttgttggggccgggcgcagtggcccatgcctgtaatcccagcactttgggaggctgaggtgggcggatcgcctgaggtcaggagttcaagaccagactggccaacatggtgaaatgccatctcaactaaaaatacaaaatttgctgggtgtggtggcgtgcatgtgtaatctcagccactcgggaggctgaggcaggagaatcacttgaacccaggaggcgaaggttgcagtgagccgacatcgtgccactgcactccagcctaggcaaaaagagcgaaactctgtctcaaaaaaaaaaaaaaaatgcttgttggggcccaagttaattgatttcacaactgctgccttggcatgagattgagatgcgtctctatatctctgtctctgtctctgtgtctctgtctctgtctatctttgtatctcacacacaaatgtccaggtctgagctctgggtcagaactgtggtccattctttgcaaactgagggtccccactctcctgagccattggccacttgcccacaccactacccaagaccagtcccacctccggacacgtcgactcactgtacacggtgatgttagaggagcctgttatctgagagccattgcagtacactgagcagaggatccgactgttgccagtcacgttgctgagattgaaggctgcccagcccatgccactggccaccagctcctttgatagggacgtctccaaggcgattttctcagagctgggacaatcagtactgcagttcacaaacagggaccctccagcagagagcacagggttctggggctccacccgcaaaaggaactcctgcccctggacaccttcaggaacatgaagaagtcctggtgtttgtttccttgtcccccaacccacgcatcaacaggccccaccatttaacacctctctccttgtgccgagacagaagggttcctgccttcatggtccagtgggaaaggtagaatccatcagagaccggggagaactcagaaggaggccagaagaggctctgatccagcataggaggaggtgagtcagggaaggcttcctggaagcggggaccattgcagcccgaaactgaaggctaagtaggagttagcaagtgaaagggacaggtgatcctggcagagggaagcacatacgcaaagggcaaatttcaggagttcagatggagcaggaagcatgaggggtgtgtgtgtgtgtgttaggggagagggatggcgtacaagcctatgctggggcctgaccacctgaaggctgaactaaggaaccagaactttctcccgaggatacagagtcagcggccaggtcgcagtgtggcaggatgtgaacagcgttgcgttctattcctctaccctctactgatccccaaaacgcagccctctccagccctccccggcttgactggtctcacctggggtcagcagacagcagaccagcagagtccagcaggccctgggccacaacacggatggtaccatggtggccattctgacagaggaaggtgccttcctgaggtgcccgaagggcaggcaggggaaaaggcggggcctcccactgcgacggaagcacagcggttaagattgcagaagtctggggactgcaccttgcccaggcctgtgggtggaaggggatgctgtggcccttgggggccagggtgggggacccagacggggctctgcaaagtggccagcactgctgagtctcccccagggaatgggctggtcccagttgcactgctggcccccatttgaattcacaggaaatgctaactaaactggtttcttttgttctcagcactgggaagcctgggtgggggggatgaggcatctccttctggctgaacttaggtgggtaggggaatattctgtccccagagaggaagttaatggggaaaactgtaggcaccattgtgtagatgttaaggtgggatttcgaggaaacattaaaaaacaaaaacaaaaacagaaacagaagcagagtcttgctatgttgccccgactggtcttgaactcctggccttaagatggcctcctctcatcttgacctcccaaagtgttgcgattacaggcgtgagccaccacgcctggccacctttgaagatcttgaggatacctccctatctttgaagatcttggggatcccccatcccctgcacaaagagctaaggtaggtgatttggggacagctgagtccctgagccactgtctatccaggattctacttggtttttgtttgtttgttttgagacagagtctcactctgtcacccaggttggagtgcagtggcgggatctcggctcactgcagcctctgcctcccgggttcaaacgattttcctgcctcagcctcccgagtagctgggattacaggcatgtgccaccacgcccggctaatttttgtactttttggtagagacggggtttcaccatgttggccaagctggtctcaaacttctgacctcaagtgagctgcccgccttggcctcccaaagtgttgggattacaggcgtgagccactgcgcccggccttccaggattctacttgtaactggcctttaccccatcctgttgtccccttgcccacccttccaggcagctggtcactgcattccaagggaaggcgccaaggggaccaggtgggacccccacctttgacctgcctctgacctcaggcctctgacctgccttctgggcttcacatctgagctccagagagagaggccttgttgagagccttgatggggccctgcactcacccactttccccagaccttgaggtcacagcacctcctctctcatctagagcacccccaccttcctaagcaggtccctcctctattcctctaccttccgaacaatccatttcccacctggtgttgagagagcagctaaaacccaagtctagtgtatttgtaaacagcagggaccagtagcatgggcctggtgcctgtagtcccagctccttggaaggctgaggtgagaggatcgcttgagcctgggaggtcaaagctgcagtgagtcgagattgtgcccctgcactccagcctgggagacacagtgagaccctgtttccacaaaaaaaaaaaaaaaaaaaaaagatgtcggacttactggctcacgtctgtaatcctagcagcactttgggaggctgaggtaggtggatgacgaggtcaggaaatcgagaccatcctggctaacacagtgaaaccccatctccaccaaaaatataaaaaattagctgggcattgtggcgggcacctgtagtcccagttactcaggaggctgaggcaggagaatcacttgaacccaagaggcggaggttgcagtgagtggagattgtgccgctgcactccagcctgggtgacagagcaagactctgtctcagaaaaacaaacaaacaaacaaacatatatatataatttataatacttacgtaatagtgagaccctgtctctaaaaataaaaaagaaagaaatatttgtaaataagtcatatttcttttttgttttttgaaacagagtctcaccgtgtcgcctaggctggagtgcaggggcacaatctcagctaactgcaatctcagcctcctgggttcaagtgatcctcccacctcagcctccctaggagctgagaccacaggtacacaccactgtgcctggctaattttctgtagagacggctttcaccatattgcccaggttggtcttgaactcctaagcttaagggatctgcctgcctcgacctcccaaagtgctgggattataggcgtgccctgctacacccgccagtaatatttctgataaagaagtatttctgggccaggtgtggtagctcacgcctgtaatcctagcactttgggaggctgaggcgggcagatcacgaggtaaggagatcgagaccatcctggttaacacggtgaaaccccatctctactaaaaatacaaaaaaaaattagccccgtctctactaaaaatacaaaaaaaaatggtggcaggtgcctgtagtcccagctactcgggaggctgaggcaggagaatggcgtgaacccagaaggcggagcttgcagtgagccgagatcgcgccactgcactccatccaggctgggcaacagagtgagactccatctcaaaaaaaaaaaaaaagagtatttctgggccaggcgtggtggctcacacctgtaatcttaacactttgggaggcctagacaggcggatcccttgaggtcgggagttccagaccagcctgggcagcatgccaaaaccctgtctctactaaaaatacaaaaaatcggccaggtgcagtggctcacgcctgtaatcccagcactttgggaggccgaggcgggcggatcacgaggtcaggagatcgagaccatcctggctaacacggtgaaaccccgtctctactaaaaaaaatacaaaaattagctgggcatggtggcgggcgcctgtagtaccagctacttgggaggctgaggcaggagaatagtgtgaacccgggaggcagagcttgcagtgagctgagattgcgccactgcactccagcctgggcgacagagcgagactccatctcgaaaaaaaaaaaaaaagtacaaaaaaatcagccaagcttgatggcacacacctgtagtcccagctactcaggaggctgcagcgggaggattgcttgagcccgggaagtggaggttgcagttagctgagattgtgcccctgcactccagcctgggcgacagagaaaggtcacctacacatgtttaaggggcctctgcacatatctcaagccattgacaagaaagcaagtacagtctggattgcaaacaatgtataatttaagctccagctgattttttttttttttttgagacagggtctcagtctgtcacccaggctggagtgcagtggcatagtctgggctcactgcaacctctgcctcccaggttcaagtgattctcccgcctcaacttcccaagtagctgggattacaggcatgcaccaccacacccagctaattttttgcatttttagtagagacggggtttcaccatgttgaccaggctagtctcaaactcctgacctcaggtgatccgcccgcctcggcctcccaaagtgctaggattacaggcgtgagccaccgcgcctggcctccagctgatttttgacagccacattgttgctataggatcctttttacgtgtgatggtgatggtctctggttctcctcattcccacaaaggttgttgaaccacagcaccagtaacactgagaatgctaagggctctagcccaggctttctcccaggttctctggtgtgcgccctcctggtgacaatgaaattgaagctaattgctttcactggttgagtctctgatcttgagtggctgtgtccacatttcattttttttttttctggtaggaataactacttttctgcatccatgctccatagactctgtccttttcagacatcctgggataaaaagatttggcttttttttttttcttcttcttcctgagacagggtctggctctgtctcccaggctggaatgcagtgacataatcatggctcactgcaaccttgacctcccaggctcaggtgatcctcccacctcagcctccctagtagctgggactataggtgtgtgccactacactcggctaatttttgtattttttctacagaggagcttttgacatattgcccaggctgttctcgaacccctgggctcaagtgatcctcccaactcaacctcccaaagtgctgggattattacaggggtgagccactgtgctgggctttcactcttaggctattaaacaatgaaggtagttattgatcctatctctttcatattcttcttctttttttttttttgagaatgagtcttgctctgtctcccaggctgggctcactgcaatctccacctcccaggttcaagcgattctcctgcctcagcctcctgagtagctgggatcacaggcgtgcgccaccacacccagctaatttttgtatttttattagagacgggggtttcaccatgttggtcaggctggcatattcttctttctaagaactgagagtgagggggctgtattgaatctcttcatgcaccaggaactgagttctgaagatgatcttattattatcagtattttttgagatgggttctcactctgttgcccaggctggagtgaggtggttcagtcttggctcactgcaacctctgccttccaggtccaagcgattctcctgcctcagcctcccaagtagctgggattacaggcgtctgccaccaggcttgagctaccacgcccagccaaaagagcatatattatgtatagaaataataagacgagccaggtgcggtggctcatgcctataatcccaggactttgggaggctgaagcggatggatcacctgaggtcaggagttcgagaccagcctgactaacatgaggaaacccagtctctactaaaaatacaaaaaattagccagacatggtggctcgtgcctgtaatcccagctactcaggaggctgaggccggagaatcacttgaaccttggaggagtttgcagtgagccgaggtcacaccattgcactccagcttgggcaacaagagagaaacaacgtctcaaaaacaaacaaacaaacaaacaaaacccaagaaataataagaccatttggaattactggactaatagaatagttaaggtttcttatagaggcaataaaatgtattttgaaagagctgctaactattgatgctgacagtatttcattcctgtgagtgactcaagcatattataaatagctagtaaaagcctggccaacatggcaactaaaaatacaaaaaattcaccggacgtggtggcgcatgcctgtacttacagctacttggaagactgaggcccaagaaccgactgagccctggaggccgaggttgcagtgagccgagatcatgccactgcactccagccaggatgacagaggagagagactccgtcgcaaaaataaaaataaataaataaataaatacctcgtaaagggaacggagcctgtggggttgagcaaaatgtactagctgtgcctgcagtgagtataacagctttacgattatgaggaaacaattttttcttttctttttttttttttgagattaagtcttgctctgtcgcccaggctggagtgcggtggcacgatctcggctcactacaacctccacctcccaggttcaagtgattctcctgcctcagccacccaagtagctgagataacaggcgcccgccaccacacccagctaatttttgtatttttagtagagacaggggtttcaccatgttggccaggctggtctttaactcctgacctcaggtgattcacccaccttggcctcccaaagagttgggattacaggcatgagctactgcgcccggccccagccaaaatttttaatagcaatgcagaaaaagaagaaaacatgacaggcgcagtggctcatgactgtaattccagcactttgggaggctgaggcgagcagatcacctgaggttaggagttcgagaccagcctggccaacatggcgaaaccccatctctactaaaaatacaaaaattagccaggcgtactggccccacgcctgtaatcccagctactcaggaggctgaggcaggagaatcacttggacccaggaggcagaggttgcagtgagccgacatcgtgccactgcactccagcctgggcgacagagcaaggctccatctcaaaaaaaaaagtcaacaagacaaacaacctagtttcatccacaaatatgttgcaagggggcaaaagacagaaagaggaacccacagaccaaaagagacgtaagaaaactggcctcgagcaaatgcaattggggactttgtttgtatttttatttatttttattttttattttattttattttttgagatggagtttcactcttgttgcccagactggagtgcaatggcacaatctcagctcactgcaacctccgcctcctgggtttaagtgattctcctgcctcagcctcctgagtagctgggattacaggcacacgccaccgcatccggctaatttttgtatttttagtagagatggggttttgccatgttggccatgttggtcttgaactcctgacctcaggtgatccgcctgccttggcctcccaaagtgctgggattacaggcgtgagtcactgtgcccggccctgtatttttatttattttattttttcagaactaaaagagacttacagaaaactggcctcaaccaaacgcaattggggaccttgtttgtatttttatttttttattcagaactaaaaataaatgatctattgggcgggtgtggtggctcatacctgaaagcccagcactttgggaggctgaggtagagggatcatttaagcccgggacttcatcaacctgggtaacatggagaaacttcgcctctacaaaaaatacagaaattagcttaagcgtgggaggcggaggttgtagtgagcagagattgcgccactgcactccagcctggatgacagagcaagactctgtttcaaaactatggggacagtaaataacagatcagcagttgccaggggttagtgagaagagagggatgaacaggcagcgcatgaatgacgtttagcgcagtgaaactactccatgtgatactatattggtgggttcatgccttatacgtttgtccagccccacagaacgtacaacagcaagagtgaaccctcatgtaaagtacagacctcaggagaaaatgatatgtcagtggaggttcatagattttttttttcagacagagtcttgctctgccgctcaggctggagtgcagtggcatgatcttggctcactgcaacctccaccaccacctcctgggttcaagcaattctcttgcctcagcctcctaagtagctgggagtacaggtgcctgccaccatgcctggctagtttttgtatttttagtagagatggggtttcaccatgttgcccaggctggtctcgaactcctgacctcccaaagtgctggaattacaggcatgagtcaccgaggttcatagattctaacacatgtatcactgtggtacaggataggtcagcaagggaggttgtgcagggggatgggagggaggggatataggagaactctgtattttccactcaactttgctgtaaacctaaaactgctctaaacaaattgagtggttatcctactactcaagaggctaaggtgggaggatcacttgagcccaggagtttgagaccaggctgggcagcagagtaagacgctgtgtctacaaaaaattttaaaattagccagatggccaggcatggtggctcacacctgtaatcccagcactttcggaggctgaggtgggtggatcacctgaggtcaggagttcgagaccagcctggccaacatggtgaaatcctgtctcaactaaaaatacaaaaatcagccaggcgtggtggcgggcgcctgtaatcccagctactggggaggctgaagcaggagaatcgcttgaaccctggaggtggaggtcgcactgagcctagaccgtaccattgcactccagcctgggtgacatagtgagactccctctcaaaaaaaaaaaaaaaaaaaaaaaaaaattagccaggtgacgtggcaggagcctatagtcccagctcctacagaggctgaggtgggaggatcacttgcgcctgggaggtcaaggttgccatgggctataatagcaccactgtactccagtgtgggtgacagagcgagacccagtccccagccccacaaaagaagtccttctggggatatttaactgcctttcacaaatgtgtctgacccaccatctcaagtcacacaggctaagtagaaacgctttgccaaacaccagaataacaataatacctttttcttttcttttttcagacagtcttgctctatcgcccaggctggagtgcagtggtgcgatctcagctcaatgcactctgccttccagttcaagcaattctcctgcctcagcctctagagtagctgagattacaggtgtgtgccaccacacctggctaatttttgtatttttttcctcaacaagaacaaacttggtaaataacgatgattgttcatggtttcagactccttttttttttttttttttttaagttccagggtacatgtgcacaatgtggtttgttacataggtatacatgtgccatgttggtttgctgcacccattaactcatcatctacattaggtatttctcctaatgctatccctcccgcaggcccctaccccacaacagaccccggtgtgggtgtgtgttgttccctgccatgtgtccaagtgttctcattgttcagttcccacctatgaatgagaacatgcggtgtttggttttctgtccttgtgatagtttgctgagaatgatggtttccagcttcattcgtgtccctgcaaaagatatgaactcatcctattttatagctgcatagtattccatggtgtatatgtgccacattttcttaatccagtctatcattgatggacatttgggttggttccaagtctttgctattgtgaatagtgccgcaataaacatacgtgtgcatgtgtctttttttatttttttttgagacagagttttgctcttgtcacccaggctggagtgcaatggcttgatcttggctcatggcaacctctgcctcctgggttcaagtgattctcctgcctcagcctcccaagtagctgggattacagacgcctaccacaatgcccagctaatttttgtatttttagtagacaagggttttgccatgttgggcaggctggtctcaaactcctgacctcaactgatccgcccgccttggcctttcaaagtgctgtgctgggattacaggcgtgagccactctatccagccaacttcatttttaaaatttttattttaaaataatataggctaggtgtagtggctcacgcctgtaatcccaacactttgggaggccgaggcgggcagatcacctgaggtcaggagtttgagagcagcctgaccaacaagatgtaaccccgtctctactaaaaatacaaaattagccgagtgtggtggcgtgcgcctgtaatcccagctactccggaggctgaggcaggataatcgcttgaactcaggagggggaggttgcagtgagccgagatagcaccattgcactccagcctggagaacagtgaaactgcctcaaaaataaataaacaaataaataaataaataaaaatacggacaggatctccctatgttgcccaggctggtctcgaactcctggactcaagggatcctcctgcctcagcctcccaaagtgctggggttacaagcaatgagccactgcatccagtcaacaataatattgtatatttatttatttaattattatttttttgagacagagtctttctctgtcacccaggctggagtgcagtggtgcaatctcggctcactgcaatctccgcctcctgggttcatgacattctcctgcctcagcctcccgagtagctgggactacaggcacccgccaccacgcccggctaatttttttgtatttttagtagacggggtttcaccgtgttagccaggatggtctcaatctcctgaccttgtgatcctcgtggcctcccaaagtgctgggattacaggcgtgagctgccgtgcccggccaatattgtatatttattaagcacttgtttgcatgtctttctgctcagcatttcacagacaccacctcatgagctctttacatgagtcctatgagatagcaagtgtgaagctcccataatggaggactaaggcccagagaggtgaagccattagcctgaggtcacacaaatgtgaaagggtgaaactggcagtctaatctatgtggcttgtgaccgccccgaccaaatactttgtgtattcaacaagtagttattggccaggcgcaatggctcacacctgtaatcccagcactttgggaggcggaggcaggtggatcacctgaggtcaggagttcaagaccagcctggccaataaggtgaaacctcaactctactaaaaatacaaaaaattagccaggcatggaggcggtcacctgtagtcccagctactcgggaggctgaggcaggagaatggtgtgaacccaggaggcggagcttgcagtgagcctagatcacgccactgcactccagcctgggcgacagagcaagactctgtctcaaaaagaaaaaaaaaaaaaagttaaacagttgaatccagccacctctgcgctgtctcatgctagctgctgtccacaggagaccagactcccagctaacccagctttcttgaagagggctccaaaaatcacaggctccagcagagaaaacatgagtttattaccagatggtggagatggtgggcctcaagtttggaagctgggggatttaagggctggattagtgcccctacaaatgttgggtccctcaagatcatggttaggctcacggccaagaaagaaaaataagttcacagaggtggggtctctagacaggagtaaggcacacggtgtgggtgaggctgacatccccctcttggtttcatcctggagcagggagcaggaggctccctctgcagccactgcctggtccagtcctcccaggcagggctgccattgtgcctcagcacacgctgaacactgaaggggcctggccttggtacttctcatggactgtcttcagaatgggtatgaggttctcgaaggttgggcgaaaggacgcctctgtctcccagcagttcttcatgagatgatagacctagaaggaaaaaccagggctggtgggggctgccctctccacagcaggatagtggggtcagggaaagacaaaggaagtctcacctcacagggacatttgtcgggccgtggcagcctctcccctcgttccagcaactcagtgagtctcagaactgtcatctgaccctgagcaatgcctatgagctcaaggaatttctacagtataaacaagacaagctcttttcaagaggcaatgaaaggcaggcacggtggctcatgcctgtaatcccagcactttggaaggctgaggtgggtggatcacctgaggtcaggagttcgagaccagcctggccaacatggtgaaaccccatctctactaaaaatacaaaaattagctgggcataatggcaggcgcccgtaatcccagctacttgggaggctgaggcaggaggatcgtctgaacctgggaggcggaggttgcagtgagccgagattgtgccattgcactccagcctgggatacaagtgtgaaactccatctcaaaaaagaaaaagaaatcactctgcaacttcatgaaatcgactgcatgggttccaatcccacctcttacacttctcagctgtgtgactttgaatttgagttcacttctctgggcctgttttctcatccgtaaaatagggtaataacatctgccacctgggattactgtgaacgttaaactaatattcatagagtaagcgtgagtcaggtgtttgccgttattattaagcctcacagcagattgttcttaccgtccagaattttttttttgagacagtctctcgctctttcacccaggctggagtgcagtggcatgatctcggctcactgcaaccttcgcctaccgggttcaagcaattctccctgcctcagccgcctgagtagctgggattacaggcacctgccaccacgcccggctaatttttgtatttttagtagagacggggtttcaccatgttggccaggctggtctcgatctcctgacctcgtgatctgcccgcctcggcctcccaaagtgctgcgattacaggtgtcagccaccgcgcccggcctatgcctttctttcctttcttttctttctctctctctccgtcctgtcctgtcttagacggagtctcgctctgtcacccagctggagtgcagtcgggagatctcggctcactgcaagctccgcctcccgggttcatgccattctcctgcctcagtctcctgagtagctgggactacaggcgcccgccaccacgcctggctaattttttttgtatttttagtagagacgggtttcaccgtgttagccaggttggtctcgatctcctgacctcgtgatccgcccgcctcggcctcccaaagtgctgggattacaggcttgagccaccgcgcctggcccagcctatgcctttctaattgctctagcaaactcccggtggggctgcgggcctggctctcaccgtgggggggctctggctggagtcacagtgcgtcagcagctcatacagggtcaccccgaaggaccagacatctgacgcatagtagaacttatactccttcaggcactctggggcatacctagggggaggggggcactcaggccacggggggctgcactgagggcttggggatcagaccaggctgaagccctcacctgagactgaaggaccctctgggctcagttgggacccacccttaagagcgcagcctgagcggggtgatatgctcattggctaggccgctcattggctaggccgggttaaccccgcccaccaggccaagccgcactctatacaccgccccttgcctccataggccccacccccgcaccgctaggccccgccgcgcttcactgggatcatgccctatcatgatacccagcatccgtctactccaccctgcctgttccaagtgaccccagcaccccctcagactgcaccccgcctggtcaccagaacacggggctgtccccatcctcgcgcacgcggtagtactcgtggccttcgggcacggccttggctaggccaaagtccccgatcttgaccagcctgtcgttgtccagcagcacgttgcgcgcggctaggtctcggtggatgtagtgctgcgcgtgcagataggccatgccctggggacggggcagggctcgtgagtttcagtggggcggggttcggccgggggcggcggcaggacctgagcagccaggagggctgggggacagtcaggtcaggccggtggctacccggccgctggagagggccggatggcacgtggcaccaagcaaaaggaggctgagccagaaagcagggacggggctagacgagcaaagctgggcaggagggcgagttgggaggggccgagccggctgtgcgtggtcccttgggaggagggggtgtggccaagcaagccaaacagttcggaggtcagtgcaaggacaagacagcctgggcaaacgagcaggggcggagcgtgagagcagactgcaccggatcgctcaggccagcccaagctgaagaggaaggggcaagctccagaagcaggggcggggccgaccaacctcgcagatctgctgggcgaagagcagcagctgggccagcccgatgctgtgccggggcaggtagtctcggaggctgcccaggggcacgtactccatgaccagctgcagcgacttctcgcctgccgcggagaggggcggccccggtgggggacgatagagggcgggccggggaccgcctaccttgagcccagcagagcccctccaaggtcgggagggaaggccaagacccgcgcacactagacccagttctcaggtgggatggacccatccagaaccccattctcacttgagggagctgctggtggctcccgtccatcctggccccagcaggtagcaccccccagatgggaaggaggcagcccagccacgctcacccagatgccaagaaccgcgtactgcagcctggggttgagagtctctaattggctaggccagactggccccgcccacaaggccacacccacgctctaaccacgccccctcaagtctctaggactcgccgggtcccgcccaccttggtcctcgcagcagcccttgtacttgatgatgtgctcgtggtagagcgtgcgcagaatgtcaatctcctgcttccagcccgagcggtgctgggggccgcagtctgccttgagggctttcaccgccaccatctcgccagtgccgtcgttggtcggatcgtagcagtacaagctgaccttgccgaagtgaccctggtcgggagcgcacgagggtcagctccacctccccaatccctgcaccactccccaacccccgatttcccgggccactcctccaggcagatcctttcggaataccccaggccccgcctactccgctctattaagactccttggcacctaggcctccctcaaagcagagggtcccacccacatctcctgagaatcaccttaggtaggaatttatcctcaacccccaaactccttcccgaccaggcgggccttttagcagctcaggcccgtccctcacctcgcccagatctcggatctttttcaaatagcgcttgtggaaaaccgtagggtccgacgccggtgagtccgggttcacagtcaagacgtcagcaagatctggaagagttgcggtgggtaaaggcctgaccccgatcctttccccagcaggcccacacttgggagtcacaaagccagccacagctaccccaggatccgattctagaggtaagaaaactttttcctgcaacagctgaaagagtccacttattgtacaaaatgatgcagagttggctgcatcaaaactgacacctgtttgggaggccgaggcgggaagatcacttgagcccgggagttcaagaccagcctggacaacatggtgaaaccccctctctacaaaaaagttaaaaaaaaaaattagccaggtgtggtggtgcatgcctgtggtcccagctactcaggaggctgaggtaggaggatcgtttgagcccaggagttttgaggctgcagtgagtctgggccacagagagacactgtctttaaaaaaaaaaaaaagaaagaaagaaagaaaaagaaaaaacagaaaaacctgacatctggaagttccgagattgggtagagggcacagatatttcatagagaaaagagaaaaactggccaggcgtggtggctcacacctgtaatcccagcactttgggaggccgaggcaggaggatccctagagcccaggagtctcaggctgcagtgagccatgatcgtgcctctgaataaccaccacactcctgcctgggcaacacagcaagacctagtctttaaaacaaaaaagagaaagaaaaatgtgatatgaccagttgaaaatggcatattaggccgggcgtggtggctcacgcctgtaatcccaacactttgggaggctgaggagggtggatcacctgaggtcaggagtttgagaccagcctagccaacacagtgaaaccccgtctctactaaaaatacaaaaattagctgggtgtggtggtggacgcctgtaatcccagctactcgggaggctgaggcaggagaattgctcgaacccaggaggcggaggttgcagtgggccgagatcgtgccattgcactccagcctgtgcaacaagagcaaaactccatctcaaaaaaaaaaaaaagaaagaaagaaaaaaaaaaagaaaataggtcaggcgcagtggctcatgcctgtaatcccagcactttgggaggccgaggcgggtggatcacgaggtcaagagactgagaccatcctggccaacatggtgaattcccgtctctactaaaaatacaaaaattagcccggcgtggtggtgggcgcctgtagtcccagctacccaggaggctgaggcaggacaattacttgaacctgggagacggaggttgcagtgagccaagattgcaccactgcactccagcctggcaacagagtgagactccgtctcaaaaaaaagaaaaaagagcatattaattttttaaagagaacaatacaaaacttttttaaaaagaaaaaaaaaactgcagtggtctaattctctaatccaaagaagttgtgtctctccccagacaaaacattaaggaggccaggcgcagtggctcacgcctgtaatcccagcaatttgggaggctgaagcagatagatcatttgaggtctagagtttgagaccagcctggccaacatggcaaaaccccacctctactaaaaatacaaaaattagccgggcatggtggcacacgcttgtaatcccagctacttgggaggctgaggtgggaggattgcttgaacctgggaggtggaggttgcagtgagccaagatcacgtcactgcgctccaggctgggtgacagagcaagattccattgcaaataaataaataaatacattaatgagagctcagggcagccaggcagggcatgcttatgaatgccactgcaagaaattggcacacaccctgaaccactgtgcagagacctctcgtgcgctataggcatacagcagggatcccagccccgtcccacttccccagggtcccagcactgggatggagctcactgtggggctgcagccgggtgaggtcacgcaggatggtgcggaatgatggcctctgggttggctcataggtcagacactggctggtgagtgtggccagctgtgggcaggagggctcgggcagccggtgctgcctctggtagaaatgctccttctgttgggaaagggacccagaggagtcaacatcctcccctcgcccccaacccgttccccaagaggcagagtcaagtccccagagtggaccgccaggtgcccgctcttatcagttccattatacagatgaggcaactgaggctccacaaagtgggaggacgtgctcacagccgtagaaccaggactgggacccaggtccagtgattatgcagagctggagtgtcacagtcagcctcctgccccaagcttccctcctgcccctcctgtagaccacagctccttaatacactgaagcctcagcctttgcacaggccatgcactctgcctaggctgcccttcctagccaggcttgttggcataattctacacttagataaaacctcttctggggccgggcactgtggctcatgcctgtaatcccagcactttgggaggccgaggtgggcggatcacctgaggtcaggagtttgagaccagcctgaccaatataatgaaaccccatctctacaaaaaatacaaaaattagccgggtgtggtggcatgtgcctgtaatcccccctactcgggaggctgagacaggagaatcgcttgaacccaggaggcagaggttgcagtgagctgagatcacgccattgcattccagcctgggcaattagagtggaacttcgtctcaaaataaaaccaccacactcatgaacctcctttgggaagccttgtctgaccccactgctgggtgaggcgcatcctcagcccttcttccccactctgcagcctgggcgtctcccatcgctgccctggtcactctgcctaaaactgaaatcaagtctcttacttgccttctgtgtgccaggcacaagtgacttccacaaggacctaaaaaggctgggactacattgagccccagcgagtggcccacctgctggtagcccagagagacttgaagtcacgaggccagaagggatgcagctttgagctctgattctgtcctctggatttcttggaggggcccccactgcggggagggcccaagggtctcctagacatacctcggagggactgcggctctgcagaggggcctctccgtcaaagcagatctccaggagggtggcgccaaacccccacttgtccatggcggtgcttaggctgttggccccacctggtaggcattcgggggccagccaggggatcctctccacccgctctgggaggccaaggtcagaggtcaccaagggtgaaaggagcaggggaagccccccactgtgcccaggtcccctcaggtactcaccctccctggagagggcgcccaggcccacgccaggatcactcagcttgatgaaggggctggtgccctctgccaaccccagccgggccagcaggatgttccggccacacacattaccatgaaccaggttcttgttctcctgaggtgggcaggagagggggtgtggccactcaggagaggcacagacgccaaccccaaacctggtccccatagggacagccaatgtgaaaaggacaactgtgactatcactgggtttctttctgttttgttttttggggggttatttttttcttgttttttttttttttttttttttttaagacagggtctcactctgtctctcaggttggagtatagtggcacgaacatagctcactgcagcttcaaactcctgggctcaagccttccaagtagcgagaattacaggtgcacatcaccacagcctagctgattcttaaatttttggtggagatggggtctagctatgctgctgcccaggctggggtgcagtggtgtgatcatagcttactacggcctcaaattcctgagctcaggtgatcctcccacctcaacttcctgagtacctcggcctacaggtgcaagttaccacattggctaattttttttgtatttttagtagaggcaaggttttgccatactggccaggctggtctcaaactcctgacctcaggtgatccacccgccttggcctcccaaactgctgggattacaggtatgagccaccacacctggctatttgtttatttttaaaagatggggccagctgggcgtggtggctcacgcctggaatcccagcactttgggaggctgaggcggatggatcacgaggtcagaagttcgagaccagcctgaccaacatggtgaaaccccatctctactaaaaatacaaaaattagctgggcgtgatggcaggagcctataatcccagctacttgggaggctgaggcgggagaatcatttgaacccgggaggcgaaggttgcagtgagccgagatcatgccattgcactccagcctgggtgacagggcgaaactccacctaaaacaaaacaaacaaaaaagatggggtctcgccctgttgcccaggctggtctcgaactcctgggctcctggccctccctgaccgacccaggccccacacacaggccacacaccaggtagctgagggcgctggccagctgctgggccaccaccatcttccaagccatgggcacatggccccgctccctccgcagccacacatccaggggtccgtgctccacgtactctgtcaccatgatatctgtaaagacacagctgctctggggcaacctgcctgcttctgccctctggatggcggggaattgggggagacgccagggagggacttggcatgtggctggggaggtgtcagggcagaggtgtgggtggagtttggtctgggttgaaagtgagtttggggagagaagaaatgcggaatgcagcagaggcagcggtggatgagggcattggggtccaagtgggatggggcacggaagaagttgaagttcaagagagaaaggtgggctgggcgtagtggctcacgcctgtaatcccagcactttgggaggctgaggcaggtggatcacctgaggtcaggagttcaagggcagcctgcccaacatgatgaaactccatcactactaaaaaaaaaaatacagccgggcgcggtggctcacgcctgtaatcccagcactttgggaggctgaggcgggcggatcacaagttcaggagttcgagaccagcctggtcaatatggtgaaaccccaactctactaaaaatacaaaaaaattacagtgaaaccccatctctactaaaaagacaaaaaaattagccaggcatggtggtgggcgccggtagtcccagctacttgggaggctgaggcagaagaatggtgggagacggagcttgcagtgagccgagatcacgtcattgcactccagcctgggcgatagagcaagactccatctcaaaaagaagaaaaaaaaaaaaattagctgggcatggtggcacatgcctgtaatcccagctattcgggaggctgaggcaggagaattgcttgaacccgggaggcggaggttgcagtgagccgagatcacgccactgtattccagcctgggtgacacagtgagactccgtctcaaaaaaattaaaaaaaaaaagagataaaggtggcagggtacagtggctcatgcctgcaatcctgtcactttgggaggctgaggcaggaagatcccttgagcccaggagtttgagatcagcctaagcaacatagtgagaccccatctctacaaaaaatttttaaaaatcagccgggtgtgatagcacacgcctgtcatcccaggtgctcaagaggctgaggcggaaggatcgcttgagcccgggaggtcgaggcttcagtgagccatgatggcaccactgcattgcagccggggcaacagagggagaccctagtctcacaaaaaaagagataaaggtgagcctacaaagtaagcaactagggatgggggggatgggcatggataagcagaggctaggggcttgaggttggggtgtaggagatgtttgggtaccagagtagtcagagggatgtgggtcagggtgtcggccagggtccaggggaaagtgggggagatgcacacacacacacacacaggggggttgagggatgggtgggtctagggttgttctgtacaagggctttattttttatttatttattatattttttgagacagagtctcgccctgtcgcccaggctggagtgcagtggtacaatcatggctcactgcagccttgaactcctgggctcaagtgatccttccattccagcctcacaagtagctaggactacaggcataggtcaccatgcctggccctgatttttaaattttttgtaaagatagggtctggacatgttacccaggctggtcttgaactcctgggtttaagcgatcctcccacctctgcctcccaaagtgctgggataggtgtgagccaccacacctagcctatacaaggagttttgagctacctgcagaggaaaggaagaggtggggttaggcagggttggatgtgcaggggctgaggcctaggagaatcagcacacatcagcactggagtctgcctgaggccatagtgctgatggggccaggagcagatgggggctggactgtagaggttgtttgggaggttgatggaagtggggatgtagttgggaatcagggtgggggttgagactgagggcaggtgagggtcgacgtgttgggatgtaagttatgggctggaatatcgttaggggttggggtctaggttgaaggtcaaggtgtagcccgggatcagagtacaggtgagagttgagaaataggcataggttggggtgtaggtcgagggttggggtacagatcagggagtgggtataagtcaggggtggcctgccaaagggggatgggtatggcgggacccactcactttcagggccgcgcacacagacgccatgcacgaaggccaggtgcgtgtgggagacctggctcatgaggctggctgtctcgtagaaggcctgtggggaccgggcaggtcaggtggctgcaaagccgacccctcccatcccacctcctccacggacacacccctcccatcccacctcctccacagacacacccctcccatcccacctcctccggccacctcctccacagacacacccccaggcctggccctgcccactcaccagggcgatgtcatggtgactagggtccagcactttgagcaccactcgtagctcctgcccacggtccctgccaggcacgagggggtcctcgtcatccatcttgccctcctcagggtccccgctgccctccactcgcaggcggccctcatacacgttggtccttgtgccctggcccaagtgggacagctgcgggatcatgtggcacagaataccgccatggtgaaagttagcagctgatctcccagggcccccagcacccacatccccaggggccctgcccttgccccgggccccttccctgcacccacctgggtgatctccttctggtcaacccggtggaagctgagctggctgaggttgagtgtcctggggctggcccgagccccccgcatgatgatgagattggaggtttctgggggcaggcatcaagtcatggagggcgggcctgggggagagatgccacatcccacccagaggtccccctatcatcgtacctcctggttggggcaggcaacagcgacgcagagagaagcagtcatccccggccctcagcaagcagccctgcaaggcagccccaagttcccgaacgctggggaaggaccggccccagccctccagcacgaaggccccgtcctgctgctcaatggggaactttcggagccgcaagctctgcatgccgtctggtgcctggcaggaggtggcagaggtgggagcagtaagcaggggaccaggcagggaacgtgtccagccccagccccagcccccagccctgggctcacctggctacgctgggccactgtgaggatcaggcggtaggggtggctggtgctccagtgaatgaggtacaggccgtcctcgggccgcagcttggcctgcacaaatggctccctggaaggtggtccagggggactatcaggccacctggggccactctggacccatacccgggaacaatgacactcattacctacttagagggcacacacacagctaggacaagtgtcagacacagccactcttgtggggacactaactctggacacacagccacttacatggagacacaatgcagcagcaggcacacacctgcttttttgtttatttgtttgtattttttagacggattttccctcgtcacccaggctggaatgcaatggcgtgatctcagcttattgcaacctctgcccacctgggttcaagcaattctcttgcctcaacacctcaacctcccgagtagctgggattacaggtccctgccaccatgcccagctaatttttatatttttagtacagagggggtttcaccatgttagccagcctggtctcaaattcctgacctcagctgatctgccagcctcagcctcccaaagtgctgggattacaggcatgagccactgtgcccggctacctgatctctcttttttttttttttttttttgagacagggtcttgctctgttgcccaggctggagtgcagcggtgcaatcttggctcacttcagcctggacctcccaggctcaagagattctcccacctcagcctcctgaggagccaggattacaggtgtgcccagctaatttttgtgttttctgtagttaaaagaccttgctacattgcccaggctgctcttgaactcctgggctcaagtgattctcccacctcggcctcctaaagcgctgggattacaggtgtgagccaccacacccagcctactcctactcttgtacttgacgccagacgggccctgacaaggtgacacacactccaagattggaaacagccatcaggagccggatgggcacacacccagccatgaccatcgccactcacaagggtgacacacggtggatggccaatcacacaagcaaaggacaacgatcccagacacaactaatcacccaatatgacagggcaacataggggccagggcatcccagacacagaggtgacacaaacatgcactataaagtgtcatggtcacataggtccagacacctacatgtgcagtggctgacacacgtggtccccaaacacctgtctgtacgggggcagcacacatatagccttgacagcaggcacggccacaggcctcacaaggtgaaatggccacttccccctcccctggcatcacaggtaggacaagggacagagagtcacagggccagtgaccagacaaagagacagtcacaaatcacgacttggcagcacacaggacagccacacactcccctgcacctgatgatgacataagtaccgacaacttcacgccctcaggcccacaagtcacacacaggaccccgctgagatggtgactcacaagttaccagcacaggcagccgcctgcagaggtggaagcatccaacatacgcctgaatggtcaccagcgtcagggtaacacacagtcccatgaaaatcaccagttctgtgcaatgacaacctcaacacacaatgacagtcatggccgggcgtggtggctcatgcctgtaataccagcactttgggaggccgaggcgggtggatcacctgaggtcaggagttcaagactaggttggccaatctgatgaaaccccatctctacaaaaatacaaaaattagcctggcatggtggcgagtgcctgtagtcccaggtagtcagttgggaggctgaggcaggagaatcgcttgaacccgggaggcggaggctgcagtgagctgagatcatgccactgcactccagtttgggcgacaaaaaataaaaaaaaaataagacgtgcacctacacacacaccctgcacagcccctagggctcacagtctagttggcacccttggcggtggcccccagcgccccccacccagcactcacagcaggggtccgtggatcccatcccggatgctcatcaccagccgtgggggagccacctcgtggcacaggtagtggctggagtcggccgtcaggcggaaatagccgtccaccagcgacacgaaggacagcgccgcagcccgggaaggcaagctcagctcctgccagccaggggcgcatcaggtgggtgtcctcccaggccatgatgggccctagcccagcccctaccctgggcctcaccaggcacttgttgtcctgccggtggatgctgacacagtgctctttcagcaccacgtgggtgatgtcccggaagtcacagaagtaggcccacagtggctcccgcggcctgtctgccggctggccgactgccttgtgagccttggccttcttcccaaacaggctggcttgggggttcctgccactgctgccactagaaccctgaacacccagcaagtggggcagaggatggagagggcaatgcccgtttatacctcctgcactttcccctggggagagactggagccagaagggccaggcaccaacctaggttgacctcccaagtcccagtgtcacaggtgggatggggacccaccccaaaatcatacacatgctggaagccggacccttagggaaggcagagagaagaatcctgaccccctcacacccaggtgccagtccccagatgaaggggttccctggaggtgcagaccccagaaataaggtccccagggggtaagcagatggaggaccttctccaagaaactggccctagcggacaggtgccccagagccatgtggggagagggctcaggtcagccaccctcagaggctagggtcaaggatgaacacagaaacccaccccagcccaacctgaacccccagggcggaaggggcgccttgctcacctcctccttgttcacctcctcctctactggccaccactggatgccaccagtgcctgtcaccagcacctcgtgggttgggggcccagcagcagactcagggccagggtctgtaggggccaccccactgtcccggatgtagcagggctccccctcggcctgggccagcagcctcaggtggcacacgggcacacgctctgtgccgaagcggggtgccagccgctcgagtgtggctaggtatttgaccatgaccatctgctgggagagtcggcccggctggaagtcccgcaggaacctgcggaagacgttccgaaggcgcagccgggtcagggcgctgtgctgccggatatgccggcggaaggagcgcgggatgcagtccttgaagctggggggaaacacagtgaggggctggtcagggacctgggttgcaggcccagctgggtgacacagggcaagtggcttaacctctttgagcctcagctgcctcatctggaaaacaggcacactagccaggtgtggtgacttgagcctgtagtctcagctacttgggaagccaaggcggaaggatcgcttgaggtcaggagttcgagaccagcctggccaacatgatgaaactcagtctgtctctactaaaaatacaaaaattagctgggcttgatggtgggcacctgtaatcccagctactcaggaggctgaggaaggagaatctcttgaacctgggacgcagaggttgcagtgagccaagattgcgccactgtactccagcctaggtgacagagagagactccggctcagaaaaaaaaaaaagtagaggcacggcaatatgcaaagtctaccctggctcccagatgctcaggacatttccccctgcctacacagcgtccccaccccattcccagacacctggtcttcttggccacctcctccagggggatgccatggcggagagcgaggtgacagaggtgcagaaaggccatgcccaggctctcattcttaaagtggtggatctcctcctcggtcgacagctcccacagtgatgccacgtcattcacaaactcatgcttgccctgggaacaggaaattgagcagaaagggaggtgtgagaatgcgttcctctctagcccagaggtatccaatcttctggctaccctggaccacactggaagaagtgtcttgggccctacataaaatacactaacactaatgatagctgatgagctaaaaaaaaaaaaaaaaaaagaatatcgcaagccgggcatggtggctcacgcctataatcccagcactttgggaggccaaggcgggcgggtcacctgaggtcaggagtttgagaccagcctgaccaacatggagaaaactcgcctatactaaaaatacaaaattagccaggtgtggtggcgcatgtctgtaatcccagctactccggaggctgaggcaggagaatcacttgaacctgggaggcagaggttgcagtgagctgagatcatgacattgcactccagcctgagcaacaagaatgaaactctgtctcaaaaaaaaaaaaaaatcacagcaaaatctcagaatattttaagatagtttatgaatttgtgttgggcttcattcaaagctgtcctgggcagcatgcagtccgcaggccaggggttggacaagcttactctagccagagaactctaatttcctgcgtcttaccaccttgaggaggggagagaccaccatttactggaaaggccaaatacacagcatacacccctcctcttgtcaatcttgtgcctgtggcagacattactaatcaatcacagcactctatccccttcaacctgaactcttggctgggcatggtggctcacacctataatcccacaatttaggaggctgaggcaggtgaatcacttgaggtcaggagtttgagaccagcctggccaacatggtgaaaccccgtctttactaaaaatagaaaaattagcctggggtggtggcgggcttctgtaatctcagttacttgggaggctgaggtggaagaatcgcttcaacctgggaggtggaagttgcagtgagctgagatcacgccactgcactccagcctgggccacagagcaagactccatttcaaaaaaaaaagatcggctgggagcggtggctcacgcctgtaatcccagcactttgggaggccgaggcgggcagatcacgaggtcaggagatggagaccatcctagctaacactgtgaaaccccgtctccactaaaaatacaaaaaattagctgggcatggtggcgggcgcctgtagtcccagctacttgggaggctgaggcaggaaaatgacgggaacctgggaggcggagcttgcagtgagccgagatcacatcactgcacttcagcctgggcgacagagcaagactccgtctcaaaaaaaaaaaaaagatccccagatagcatgagttgaaacctattagctatattgaatcagggagggaaatgggggctcctcaactgcccctaagtctcccacaaatagtcttgccaccccagccctgctcatacctgctcaaagaggtactcaaatgaggctgggtccaggagttgcatcccctgtgctgtctgatctgaggatgcctcggttcctgggggcccacaacggtacacagccggttcccgaggattcatgccatgccagttccggaaataaaacctgcaggaaggagggacgcagctggggcttagcacagagtcagaccagcttcagcacaggaggggacgagctttgcaaaggtctccacccaccttatgcggaaatatagcatcaggcttgcatctctggggatctctaggatgtggtttgggggcaaccagacttgggcctgagcatcgaagagggcaaagagattgaagcaaggaggagtgatacctggatcaggtgagaaacgaggtcaggagtcacgtcatttgctaccgtcagccccaaagaccccccagacccaatgtctgccttcacactccctctgaggccccctcccccacctgcagcttcagtctcacgttgcccctgggcagaggacagtgcgtatgttgcccatgctgtggcctcacaggaggactacatttcccagcctcccttgcagctaggatggagccaattgcactgctggtttctggccaaagggctgggtacatttccaagcctggaaataaattctcttgccaccttcaccacccgaggtatgatgaaggcttcttgtgacagatggtgaagctgtaagacagaggtgaaccatccaacctgtacttgattttaagtaaaactttttttttttttttgagatggagtcttgctgttgcccaggctggagagcagtgacacgatcttggctcgctgcaacttccgcctcctgggttcaagtgattctcctgtctcagcctcctgagttgctgggattacaggtgtgcgccaccaaccccggctagtttttgtatttttagaagagacgaggtttcgccatgttggccaggctggtctcaaactcctgacctcaggtgatctgcccaccttggccccccaaagtgctgagattacaggcatgagccactgtgctcggccgattttaggtaaaccttgattaagatttggggggattgcttattcctgcagcaaaactaatcctagcctgacccacataactctacaaactgctgcaattgtctggcgtctccctgaactccagccccaaagaaacatccagtcacctcctggctgtctccccctggacatcacaggcccccccttagatatggcttgttccaaacaacatatcttatctgtggttggcaaactccaaccttcccttcctctgcccttttttttttaagggtcagggtctttctttgccacccaggttgcagtgcagtggtgcaatcctagctcactgcagcctcaacctccagggctcaagcgatcctcccacctcaatctctggagttgatgggattatggctatgagccagggtgtgtggcttctgcccagttcttcaaaccaggaacttggtccttatcttcaacctctcccacctgctccaaaacagatcggtcaccaagacctgctcttcctgcaccctccatgtcctggggctccatccaccaccttcaaatgcaaacctcaaccccaatccagtctccagacttgctgtaatttcccacaccagctacccagggtatctttcttctactgatgtcatttaaaaattgtacctgtcggccgggcgcagtggctcacgcctataatcccagcactttgggaggctgaggtgggcagaccacgaggtcaggagatcaagaccatcttggctaacatggtgaaaccccgtctctactaaaaaatacaaaaaattagccaggcatggtggcggatgcctgtagtcccagctacttgggaggctgaggcaagagaatggtgtgaattcaggaggtggaacttgcagtgagccgagattgcgccactgcactccagcctgggcgacagagcgagactctgtctcaaacaacacaacaaaacaaaacaaagaatcagccatggccaggctcgagggtgcacacttgtaatcccaacactttgggagtctgaggcaggtggatcacttgaggtcaggagttcgagaccagcgtggccagcatggtgaaatcccatctctattaaaaaaaaaaatagctggacctggtggcatgtgcctgtaattccagctacttgggaggctgaggcaggaggactgcttgaacccgggaggcggaggttgcagtgagccaagatcgtgccactgagctccagcctgggcggcagagtgagatctgaaaaaaaaaaattggctggccatggtggggtgcacctttagtcccagctactccggaggttgacgcaggacaatcgcttgaacccgggaggtggagggtgcagtgagccgagattgtgccactgcactccagcctggcgacacagcaagactgtctcaaaaaaaaaaaaaaaaatggtatctggctgggtgcagtggcccatgcctatagtcccagcactttcggaagctgaggcaggtgaagcacttgagggcaggagtttgagaccagcctggccaccagagcaaaacctcgtctctactaaaaatacaaaaattagctgggtgtgggggtgagcacctgtaatcgcagctactcagcaggctgaggcaagagaattgcttgaacctggaggcagaggttgcagtgagccgagatcacgccactgcgctccagcctgggtgaaagagtgaggctctgtctaaaaaaataataataaaatgaaataaataattttatctaaagctgggtatggtggctcacatctgtaatcccagcactttgggaggctaaggcgggagaatcacttgaacctaggagttcaagaccagcctaagcaacatagtgagacccctcatctctaaaaaaactaaaaataaaataaattagccaggtgtggctggagtgcagtggtgtgatcatggctcactgcaccctcgacttactgggctaaagcaatcctcctgcctcagcctcccaaggagctgggactacaggcgcacgccaccatgcccagctgatttttgtagtttttgtagagaaggggtctcaccatgttgtccaggctggtctcaaactcctaggctcaagtgatcctcccacctcagcctcctgagtagctgggaggctgagctactcagcctccaaagtgctgggattacaggcataagccagtgtgctctgccctgaagtagtgtttataattttcatatcctctacaatctagccttaaatgttatgaactgtggctgggcacagtggctcacgcctgtaatcccagcactttgggaggctgagggaggcggatcacctgaggtcgggagttcgagaccagcctgaccaaaatggagaaaccccgtctctactaaaaatacaaaattagctgggcgtggtggcgcatgcctgtaatcccagctactcgggaggctgaggcaggagaattgaacctgggaggtggaggttgcggtgagctgagatcgtgctattgcactccaacctgggcaacaggagcgaaactctgtctcaaaaaaaaaaaagttatgaactgtaaatgtgtggtattatactgcagacgtccctctgcaatgtgctttttcaggctacgagaggttataaagcttcatgcagaatgacatgagtaattctggttaaattccttctcccggctgcgcagtagtccagtattcaaccagattgcaatttacttaggcagtctcttattgagggactttgcaatggtctccccttttccatatgataaacaaggcggctctaaacattctcataagtgtccctgggagcacatgagctgactgtttatagagtgactgtcactgtccaggagtggaactatatggcctcagggaagatgtttctgagtttttgtttttttttttgagacggagtctcgatctgtcgcccaggctggagtgtggtggctcaatctccgctcactgcaagctctgcctcctgggttcacgccattctcctgcctcagcctcccgagtagctgggactacaggcgcccgccaccatgcccagctaatttttttgtatttttttagtagagacggggtttcaccgtgttagccaggacggtcgcaatctcctgacctcatgattcgcccacctcagcctcccaaagtgctgggattacaggcgtgagccacggcgcccggcctgggtttttttttttttttgaagcaggatcttgctctgacatataggctggaatacagtggtgcaatcatggctcagtgcagccatgacctccctggctcaagcagtcctcctgcctcagtctcctgagtagctgggaaatacaggaacacgccaccacacacagctatatatatatatatatatatatatatttttttttttttttttttttttgagacagcatcttgctctgtcacctaggctgaagggcagtggcatgatcactgtagcttcaacctcccgggctcaagtgatcctcccacctcagcctcctgagtagctgggactacaggtgcacaccagcacacagcacacctggctaattttttgtatttttagtagagacggggtttcgcgatgttgcccaggctgatcttgaactcctgggctcaagtgatcctccacgcttagcctccaaaactgctgggattgcaggcgtgagccactgcatccagctttgactgtgttatcaaatcactctccaaagtcacaccatggaattatactgcccctctgtgaagggaggatacctccctgtgaaacaatatatattttttttagatggagtcacccagactggagtgcaatgttgcaatcttggttcaccgcaacttctgcctttcaggttcaagtcattctcctgtctcagcctcctgagtagctgggactacaggcatgtgccaccatgcccagctaattttttgtattttttttttttttggatagagtttttgctcttgttgcccaggctggagtgcagtggcgtgatctcggctcactgtaacctccaccccctgggttcaagcgattctcctgcctcagcctcctgagtagctgggattacaggcgcccgccaccacgcccggctaattttttgtattttcagtagagatggggtttcatcatgttgaccagactggtctccaactcctgacctcaagtgatccacccgccttggcctccctaagcgcaaggattacaagtgtgagctacggcacctggccaatgtttcatatttttgttttttgagaccgagtctctgtcacccaggctggagtgcagtggtgcgatctcggctcactgcaactccgcctcccaggtttaagtgattctcctgcctcagcctcccaagtagctgggatgtgcgtcaccacgcccagctaatttttatatttttagtagagacggggtttcaccatgttggccatgctggtctcaaactcctaacctcaagtgatctgcccgcctcagcctcccaaagtgctgggattacaggcgtgacccactgtgcctggcttgagacaacttcttaaagaaccagtcaaaaataaaaaataaaaataaaagaactagtcagactgcttcactctctggcttaaaccttccatggctccccattgctcccggagaatgcccaaccccttgacccttgattctgagtacccccaccctggcttttgcctgctatgccccaatttcaattgttacttccccttccaaactctcaaaattgataccccagtcaccctgaaggtctttcgcttcctcaaacagatcaagctctccgggcctccatgcatgctgttccctctgctgagcgtgtttcacatcacccgcacacctgtctgaatcctttaataatcagtcatgggggcgggcacagtggctcacacctgtaatcccagcactttgggaggctgaggtgggcggatcacgaggtcaggagatcgagaccatcctggctagcacagtgaaaccctgtctctactaaaaatacaaaaaattagccaggcgtggtggtgggtgcctatagtcccagctcctcgggaggctgaggcaggagaatggcgtgaacccggaaggcggagcttgcagtgagctgagatcgcgccactgcactccagcctgggcgacagagcgagactctgtctcaaacaacacaacaaaacaaaacaaagaatcagccatggccaggctcgagggtgcacacttgtaatcccaacactttgggagtctgaggcaggtggatcacttgaggtcaggagttcgagaccagcctggccaacatggtgaaacccccgtctctactgaaaatacaaaaattagccaggtgtggtggtgggcgcctgtaatcccagctactcaggaggctgaggcaggagaatcacttgaacccgggaggcggaggttgcagtgagccgagatcacaccactgcactccagcctgggtgacagagcgagactccgtctcaaaaaaaaaaaaaaaaaaaaaagccgggcacggtggctcacacctgtcatcccagcactttgagaggccgaggcagggggaacagcatgcatgttcaagaccagcctgaccaacatggtgaaaccccgtctctactaaaaatacaaaaattagctgggcgtggtggcaggcgcctgtaatcccagctactcaggaggctgaggcaggaggatcgctagaacccgggaggcggaggttgcagtgagccaagattgtgccattgcactccagctttgaggactgagcgagacttcgtttcaaaaaaaaaaaaaaaatcagtcatggccaggcgcgatggctcatgcctcccaacactttgggaagccaaggcgggtggatggcttgagcccaggagtttgagaccagcatgaggcaacatgcaaaaaatacaaaaattatccgggtgtggtgacatgtgcctgtagccccagctatttgggagactgaggcaggaaaatcacttgagcctgggcagttagaggctgcaatgcgtcatgattgcaccactgcatttcagcctgggcaagagagagactgtctctacgaaagaaaaaaaaaaaaagactcagccatcaatggggaagtaggaagtgttataaaaattgattacaatgcccccatccagtcatggaaagctgggaatgggggaggtaagaggagtttctggaggaaggtatatgtaaccaaagccgccttagaaaggcctttccttggttgggcatggtggctcacgcctgtaatcccagcactttgggaggctgaggcaggtggatcacttgaggtcagaagttcgagaccagcctggccaacatggcaaaactccagctctactaaaaatataaaaactagccgggcgtggggtgtgcacctgtaattccagctactcaggcggctgaggcaggagaatggcttgaacctgggacatggaggttgcagtgagctgaggtcacaccactgcactccagcctgggtgacagagtgagaccctatgtcattaaaaaaagaaaattgggccgggcatggtggctcacacctgtaatcccagcactttggagggccgaggcgggcagatcacgaggtcaggagatcaagaccatcctggctaacacggtgaaaccccacctctactaaaaatacaaaaaaaaaaaaaaaatctagccgggcatggtggcacacacctgtagtcccagctactcgggaggctgaggccggagaatcgcttgaacccgggaggcggaggttgcagttagctgagattgcgccattgcacttcagcctgggacagagcgagactccatctcaaaaaaaagaaaaaaagaaagactgtagtagatatatttggaagtgcaatttcctgtgcaggaggagggaaagcctttctttcttttttttttttttttttctttgagatggagtttcgctcttgttgcccaggctggagtacaatggcacgatctcagctcactgcagcctccacctcccaagttcaagcaattctcctgcctcagcctcctgagtagctaggattgcaggcacctgccaccatgcctggctacattttgtatttttagtagagatgcggtttcactacattggccaggctggtcttgaactcctgatctcaggtgatctgcccgcctcagcctctgaaagtgttgggattacaggcatgagccaccgcacctggcctttttttatttttgaaacggagtctagctctgtcacccagcctggagtgcagtgctgtgatctcggctcactgcaacctccatgtcccaggttcaagctattctcctgcctcagccttctgagtagctgggattgcaggcacctgccaccatgcctggctacattttgtatttttagtagagatgcggtttcactacattggccaggctggtcttgaactcctgatctcaggtgatctgcccgcctcagcctctgaaagtgttgggattacaggcatgagccaccgcacctggcctttttttatttttgaaacggagtctagctctgtcacccagcctggagtgcagtgctgtgatctcggctcactgcaacctccatgtcccaggttcaagctattctcctgcctcagcctcctgagtagctggaattacaggtgcgcaccccacgcccggctagtttttgtatttttagtagagctggagttttgccatgttggccaggctgctctcaaacttctgacctcaagtgatccaccagcctcagcctcccaaagtgctgggattacaggcatgagccaccgcgcccggcctgactttctttttttaatgacactgggtctcactctgtcacccaggctggagtgcagtgacgaaaccatacctcattgcaggcttgaactcctgggctcaagcgatcctcttgcctcaggctctcaagttgctgggactacaggcatgtaccaccatgcctggctaatttctaaaaattattttgttgagacaaggtctccctatgttgcccaggctggtctccaactactggcctcaagcaatcctcctgcctgggcctcctcaagtactgggattacaagtgtcagctactgcacctggccaagttttctgatttattatatttcttgctgtcctccctactaaaatttcagctctacaaaggcagtgatttgcagctgccacacagtagatgcttacaaaatgttcaccgaatgaacgggtggatggatggatggatggatggatggatggatggatggatggatggatagatggatgaataggtgggtgggtgggtggatggatggatggatggatggatggatggatggatggatagatggatgaatgggtgggaggatggatgggtgggtggatggatggatgcatggataggtgggtgagtgggtgagtgggtgggtggatggatggatggatggatgggtgggtgggtggatggatgggtgggtgggtggatggatggatggatgaatggatggatgggtggatggatgggtggatgggtgggtggatggatgggtggatggatgaatgggtgggtatggatggatcgatgggtggatggatggatagatggatgaatgggtgggtggatggatgggtggatgggtgggtgggtggataggtgggtggatgggtgggtgagtaggtggatggataggtggataggtgggtggatggatgagtgggtgggtggatgtatggatggatgcgtgggtggatggatgggtgggtgggtgggtggatggatgcgtgggtggatggatgggtgggtgggtgggtggatgaatgggtggatgggtggatgggtgaaagggtgggtggatgggtgaatgggtgggtgaatgggtgggtggatgggtggatgggaggatggatggatgcatgggtggatggatgggtgggtgggtggatggatgggtggttgggagggtggatgggtgggtggatgggtggatggatggatggatggatgagtgggtggatgggtgggtggatgggtgggtgggtggatagacggatggatggggcccagctgctgcttgcacacccaccccagtccccatggtgccaacgccccagactcaccaactttatgtgcaatgtggatgcagacttcctcagctgtcagcgatgactcactgaaagtgacccagggctccccgccgcctggaccagcccagtgcagaagcaccttcaggcctcccatggcagccatgggctgggctccatccccaacgggcttactgcccctggccatcccccagtggcgcagaggcatgctcccggcaggtggctcagctggaaaggggacaatctgtcagctcccaagtctcagcccagagacccctgttagctcttcaaccttccacccaccccagctaaggcctgaggggaagattctgggctcccatcttggcatgacattagagacccgattccctctctgagtctcgttttccacatttattggacagggttggggtatgcatccccacctagatctctcatcaacaataacactgaaccctcctctctttccacaaattgacacagatataaaaatctgctctggccaggtacagtggctcacgcctctaatcccaggactttgggatgttgaggcaagaggattgcttgagcccaggagctcgagaccagcctaggccatatagcaagaccctgtttctacaagacgttttattttatatcttatcttatcttatcttatcttatcttatcttatcttatcttatttttgagacagagtttcactcttgttgcccaggctggagtgcaatggtacaatcttgctcaccacaacctctgcctcctgggtttaagtgattctcctgcctcagcctcctgagtagctggcgcctgccaccacaccgggctaatttttgtatttttagtagagacagggttttgccatgttggccaggctggtcttgaacctctgacctcaggtgatccacccgcctcggcctcccaaagtgctgggattacaggcgtgagccactgtgcccggcctctacaagaaatttttaaaatttagccaggcgtgggggtgcacatctgtactccaagctactcgggaggctgaagtgggaggatctcctgagcccaggagttggaggctgcagtgagcagtgatcgcaccactgcattccagcctgggtgacagagtgagaccctgactctaaaaatataaataaataaataaataaataagtaataaaaatatataaaaagggccaggcgcggtggctcatgactgtaatcccagcactttgggaggccaaggcggacagatcacgaggtctggagattgagaccatcttgaccaacatggtgaaaccccatctctactaaaatacaataaataaataaataaataaataaataaataaataaaaagtaaaataaaaatctgctcttaacacacctccccaaaataaccagacaggcagatgtggtcaaacatacctgagggtgagtcctggagctccctgtgtcaactcaagcaagccacttagcaattctgggcctcagtttccccatctggaaaagggaggtcctcagggtgttgccatcaaaagatggttgtaatgtttcaatatagttccgcatattacacattcagcacagaccctgattcaggcacacacaaaaagaacaaatatgaccaaaacaagaataacataattgttattagtttcatcgtggtgatggcctctttcaggccacaattctcctctcccacatttacccccatgagtgacctcagtccctgttgactccccaaagcctaggagagtttatgtccagctccatccccccaatccagggcctgagcctcctgagggcgccagtatggaagtggaggggctgtcacttccacccatgttgctggtttcctcatctggaaaatgggcatgtaacagtgtctacctcaaaaggctgctgggaggatttaacgcgaggaggcagagaaagtgcctggtatacagtaagcgcttaattagcctttgccattaatacctattcatgttatagatgagatcccggggatggggctttcgcggagcctacttcctccttcctcctttctcgtccccactggacccagacccagctttgaagacagggtcggagtgaagtttgcaactgggaaggctgcacgcccccatgtcctccccccaaaacctctaaacccggccggcaacggcgggaactgggatgtgcacccaccgggcatcggagcagtcccgaggcaccaggtgctcccatccaagtgcagcctgtcaagcgcagccagtccccgcggcttcttcctgaggacctccggccgcgctccttccgcgcccgcgtccagactcacccttccgggggaacacaagctcgaacccggacccctccccgctcccgcgggtagctactgcttgtcccccgccgagacgcctcctcccattggccgcctgaaacgcacacgcccattggcagctgctctgttctccctgctcgtcaccattggatttttttttttttgccatggtggcggcactctcattggtcctggggctcattcgtcactcagccgcgattggctgagtcggcacccagatgcgctgtcgcttctgctattggctggcactcggtggacggagacgggggaggggcttgcgagaggcgggagggagagcgaagtgtgtgggcaacgcggccggatcctggagttcccctccgtgctgtggaattgggtcaggcgtgtacggtcctgaccctaggacacagctgcatgtcctcacctcggtgttcaaagctgcaccggccaccattcaaccctccgacgccctgccctttggcttccccgttccatccggtcctgtctcctttccctcgtttctacctggccgactccatcctgctgactagaattccccctccttcactcctgggaggcattcctcgcccacctgccccagtcctcttcctgatcacctgcagccctgtcctctgaagctccctagcggtcagggtagcagcttggacatcccgccagacgtgaattcaaatccccactccgcaagtcgtgcccatttgctgagaagcctacagccagagcgtttcacatacattatctcatttgatcctagcagcaattccctgtatggcggctcttattatccccatttcacagaggaagaaactcaggcatgaagaggtaacaaagaccgtcctctgacccttcttctgtgccacaccataaccactcctcgactttgtctttcacctgcccagccaagtcttagcaaagaagcctattaagtcatccgctcatccttgatgtctgatcaacttcctcatcttccacttttttttttttttttttttaagatggagtttcgctcttgtcgcccaggctggagtgcaatgctgcgatctcggctcactgcaacctcagactcccggattcaagcgattctcctgcctcagcctcctgggtagctgggacaacaggcgcccgccaccacgcccggctaatttttgtatttttagtagagatgggatttcaccatcttggccaggctggtctcgaactcctgacctcgtgatccaccctcccaaagcgctgggattacaggcgtgagccaccgcacccggcccttttgttgttaatttttaaattttgtggctaatttttaaatttttgtagagatggggtctggctatgttgcccaggctggtcttgaacttctggcctcaagcaatcatcctgccttggctttccaaagtgctgggattacagatgtgagctaagacacccagctccatggagttggtcttaactgccatggccaagggacatgtggctgcttctctctgagtcagaaaatatgggtaaaaagcctcctcacagggcagctgtggacattcagtatgaaaatgctgaaagagatcgggaatggtctctttcacacctgtaatcccagcactttgggaggtggaggcgggcggatcacctgaggtcaggagttcaagaccagactggccaacatggtgaaaccctgtctctactaaaaatgcaaaaattagctgggcatggtggtgggcacctgtaatcccagctattcaggaggctgaggcaggagaatcgcttgaacttgggaggcagaagttgcagtgagccgagatcacaccattgcccttcagcctgggcaacaagagctaaactctgtctcaaaaaaaaaaaaagaaaaagaaaaagaaagaaaatgctgatagaggccgggcacagtggctcacgcctgtaatcccagcactttgggaggccgaggtgggcggatcatgaggtcaggaaatcgagaccatcctggctaaggcggtgaaaccccgtctctactaaaaatacaaacaattagctgggcgtagtggcagcctgaggcaggagaatggcgtgaaccggggaggcggagcttgcagtgagccgagattgcgccactgcactccagcctgggcgccagagtgagactctgtctcaaaaataaaataaaataaaataaaataaaatgctgatagagacttgtcctggctggatgcagtggctcatccctataaacctagcacttcagggagctaaagaaggagtactgtctgggcccagttcaagaccaacctgggcaatatagcaagaccccatctctacccaaaataaaaaaaattagtctaaggctgaagtatgagaatcgcttgagcccaggaggtggaggttgcagtgggctgagatcccaccactgcactccagcttgggctacagagtgagactccatctcggggggaaaaaaaattagttagtcccagctactccgaaggctgaggtgggaggattgcttgagcccaggaggttgaggctacagtgagccgtgatcacaccactgcactccagcctgggcaacttgacctcctgggctctgctgtattttcttcagagtccttattgcaacctgacatttcatgggaagtttctttctttttttttttttttaaagagacagagtcttgctctgttgcccaggctggagtgcagtggcgcaatcttggctcactgcaacctctgcctctcaggttcaagcaattctcctgcgtcagcatccccggtagctgggattacaggcgtgcaccaccacgcctggctaatttttgtatttttaatagagacagggtttggccaggttggccatactggtctcgagctcctgacctcaggtgatccacccgccttggcctcccaaagtgctgggattacagatgtgagccaccgcgcccagctgggtttctcttctttctttctttcttttttttttttttttttttttttttgagacaagaatctcgctctgttgcccaggctggagtgcagtgctgtgatctcaattcactgcagtctcaacttcccagattcaccattcacaatcttccacctcagcctcctgagtagctgggactacagatgtgcatcacgatgcctgggtaacttttttttttttgaggcggagtcttgctctgttgctaggctgaagtgcagtggcacgatctcggctcactgtaatccctgcctcccaggttctagcgattcttctgcctcagcctccagagaagctgggattacaggcgtgtgccaccacacccagctaatttttttgtattttttagtagagatggggtttcaccatgttggccaggatggcctcaatctcctgacctcatgatcctcacgcctcggcctcccaaagtgctgggattacagaagtgagccaccgcgcccagccgcctggctaacttttgtgtgtgtgtattttttatagaaatgggcttccaccaaccccgtctctactaaaaatacaaaaattagccgggtgtgttggtgggtgcctataatcccagctacttgggaagctgaggcaggtgaatcacttgaacctgggaggcggagtttgcagtgagctgagatcgcgccactgcactctagcctgggcgacagagtgagactctatctcaaaaaaaaaaaaaggaaaagaaatgggttttcaccatgttgcccaggctggtctcaaactactgggctcaagtggtcctcccgccttgacctcccaaactgctgggattacaggcgcatgccaccacacccggctaattttttagtattttttagtagggacgaggtttcaccatgtgggccaggatggccttgatctcctgacctcgtgatcctcccgccttggcctcccaaagtgctgggaataccggtgtgagccacctcgcctggccggctggctaacttttgtgtgtgtgtaatttttttagaaatgggttttcactatgttgcccaggctggtctcaaactactgggctcaaactgctgggctcaagtggacctctggccttgacctcccaaactgctgggattacaggcatgagccaccgtgcccagcccctgggaagtttctttgagcacaagttctattgcctgtctgcggttctaggaccgcaccagaaagaggtccgtctggttgtctgctaagccctcagtgcctgagattgtgcatccagcccagtaggtggcttaagaagccacagctggaggggaatgaatggcctgggagccaggaatccctggctgttgtcctgcctgctgcgggagggctggctgtgagcttcctctctgtcgccgcttagagtacagtacctagaagccaagagtgccagatttttctttttccttttttcttttattgagagagggagtttcgctcttgttgcccaggctggagtgcaatggcacaatctcggctcaccacaacctctgcctcctgggttaaagcgattctcctgcctcagcctcccaagtagctgggattacaggcatgcgccaccacgcccggctacttttttgtatttttagtagagatggggtttctccatgttggtcaggctggtcttgaactgccgacctcaggtgatccacccacctcggcctcccaaagtgctgggtaatactggtgtgagacaccgtgcccggcctagagagtgccagatttttcaacagccattggggcaatgctccgtgattagatgctagaacacagtgggccgagtgggcctgggacccggtattccccgctcccaaaggaactagaaggaaatgccacatgaggcgattaataataacaatgctagtcatactcccagtaacgatatcaattctaacaatgagctggtgcggtggctggcacctgtaatcccagcactttgagagacagaggcaggaggatcgcttgaacccaggagtcccagaccagcctgggcaacatagtgaaacctcgtgtctacaaaaaaaatttaaaaattagctgggcatggtgatacacgcctgtagtcccagctactagggaggctggggtgggaggatcgcttgagtccacaggttgaggttgcagtgagctgtgatcgcaccactgcactccagcctgggcaaccgagcaagaccctatcaaataaataaataaataaataaataaataaataaataaataaagctgacattttcccagcctgcacactggggccgagcgtgggtatttagccatctctgggtcttctcagtttctttcttttttttttttttttgagatggagtctcactctgttgcccaggctggagtgcagcggcgtgatctcggctcattgcaagctccacctcccaggttcatgccattctcctgcttcagcctcccgagtagctgggactacaggtgcccgccaccacacccggctaattttttgtatttttagtagagacggggtttcaccagggttagccaggatggtctcgatctcctgacctcgtgatccgcccgcctcggcctcccacagtgctgggattccaggcaccagccactgcacctggcctcttctcagtttctttgcaagtggtatcagcacccccacttgacaattgaagaaaagaggctaaggaggctgttttgccaaggcctggcgcctcctgcccaaactcagacctggtccataagggaggccccagaccccacatgtgactaacaggagggggtttcccaggactgagggggttccccaatggggggctttccatgctaaaattgggacagtcctgggcaggccaggacagttggccacgccactacggcgggtttctcagaaggaacaaaagctgggggcttcccctggctctgcaagggctgcagggaggggcctcctcagagccccctgggacctgggaaaagccaagagttgatggattaaaagtaaaatacctttgtgttttcatgagtgagaaagttcagggaacagccagtctcctcctcaaaacaaccatgagatggatttcctgggaaatcttttttttttgagacagagtttttcctcttgtcgcccaggctggagtacaatggcacgatcttggctcactgcaacctctgcctcctgggttcaagggattctcctgcctcagcctcccgagtagctgggattagaggcgcctgccaccacgcccagctaatttttgtattttttgtagacacggggtttcaccatcttggccaggctggtctcgaactcctgacctcaggtgatccacccgccttggcctcccaaagtgctgggattacaggcatgaggctaccgcactcagcctcctgggaatctttccacaaaaattctacgctcctttgggcacgtgtgtgaacctgtgttctctagaaaattctcaggagcagccccaaatgggacactcggtgctggcctgagaggatacagaggagtaacttacacacatgaaggctggcaccagacgggctgagttcaagccccagctccatcactgtgtgatcctgggcggccccttaaccccactgtgcctcagtttcctcctctgcaagatgtgactatttagtcccaaacccagaggcatgtcagggacatcaaatgagttaatacacttcattagccaggtgtggtggtgcatgcctgtacaggaggctgaggcaggagaatcgcttgaacctgggagatggaggttgcagtgagccgagatcgtgccactgcatttaagcttgggcaacagagcaagactcggtctcaaaaaaaaaataaataaaaggactggtggtggatagccagatgcagtgtgtgtctcttggctgtaatttgagctactcaggaggttgaggcaggagaatcacttgagcccagaggttagaggctgcagtgagctatgattgtgccactgcactccagcctgggtgacagagccagatcccatctcttaaaaaaaaaaaaggggggggccacacatggtggctcatgtgtgtaatcccagcacttcggaaggccaaggcgggcagtcctcttgaggtcaggagtttgagaccaacctggccaacatagtgaaaccctgtgtctacaaaaaatacaaaaattaggccgggtgcggtagctcacgcctgtaatcccagtactttgggaggctgaggcaggtggatcatgaggtcaggaaatcaaacccatcctggctaacacagcgaaaccccgtctctactaaaaatacataaaaattagccgggcgtggtgccagacgcctgtagtcccagctactcaggaggctgaggcaggagaatggcgtgagctcgggaggcagagcttgcagtgagctgagatcaggccactgcactccagcctgggcgacagagcaagactccatctcacaaaaaaaaaaaaaaaaaaaaaaaaaaagggccgggcacagtggctcacacctgtaatcccagcactttgggaggccgaggagggcagatcacgagatcaggagatcgagaccacggtgaaaccccgtgtctactaaaaatacaaaaaattagccgggtgtggtggcgggcgcctgtagtcccagctactcgggaggctgaggcaggagaatggcgtgaaccccggaggtggagcttgcagtgagccgagatcatgccactgcactccagcctgggcgacagagtgagactctgtctcaaaaaaaaaaaaaaaaaaaagccaggtgtggtggagtgcgcctgtaatcccagctacttgggaggctgaggagggagaatcccttgaaactgggaggcagaggttgcagtgagcccgagatcatgcgactgcactccagcctgggcgacagagtgagactcagtctcacaaaatacaaacaaaatcttcaataacaaggaatgcagtattttgaaaaactgaaattaacaccaaaatgtgtatgatgaacaaaaattattattattattattatttttgagacggagtctcactctgttgtccaggctggagtgcagtggcgcgatcttggctcactgcaacctctgcctcccgggttcaagcgattctcctgcctcagcttcccgagtagctgggattacaggcacgtgccaccacgcctggctaagttttgtattttttgtacagacggggttccaccatgttggtcaggctggtcgcggactcctgaccttgtgacccgccctcctcggcctcccaaagtgctgggattacaggcgtaagccaccgcgccccgctcaaaaattaaaatttttactcggcagggcacactggcctgtagtcccaacactttgggaagctgaggcgagcagactgcttcagctctgttcaaatccagcctgaacaacatggagagaaccctgtctctgaaaaataaataaataaaaagatcttggaaggtgtctgaggctcaatcagggttccaggagtccccctgcagctcctacctgtcgttctcactcatacaaaacactaaggaaagttactagatttgcagctcactcctgccccctggtggtgatcggcttgggcacaacagcattccaggggtttttatccaatgcttttgcaaatgtttcctgaaggtcccctttctggcactgtgtatgttgcaagaaaaagtccgtgctctggtggcacccacagtacatgggaggtgacaatacacaggtctgtgtgaagaaaggcatgtgaggcaggtttggtggctgagcatgaggggaattaaagtaggtcaaggagggcctcagagaagtggcattgatctgtggtctgagtgacaagcagtcccctcagagatgatgtcccccaggagaggtaggcataagtctactggatcggaggtatttcatgtcttaaactgatgtgaacctgggtatttattgtactttgatcttagctcactgcagccttgacctcccgggctcaagcaatcctcctgccttagcctcccaagtatctgtaactacaggtgcgccccactgcgcccagcactgttttttttttttgttgttgttgttgtttttgagataagtctttgtcacccaggttggagcgcagtggcgtgatcctggctcactgcaacctccacctctcaggttcaagcagttctcctgcctcagcttcctgagtagctgggactacaggcacgtgccaccatacctggctaatttttgtgtttttagtgcagactgggtttcaccatgttagccaggctggtcttgaactcctgggctcaagtgatcctcctgcctcagtctcccaaagtgttgggattacaggtgtgagccacgcctggccgtgcactcttctttaagacttttcctgtggcagaaatattttgtgacttttgaagacggccagcaagtgccaaggtccccgttcagagaatctgagtgccaggtgccagttgtctgaaccattacctcacttgtccccctcactacggcctgaggagggcactagcgcgacgacgttagccctaagagcagggacactgaggctcagcgcatcacccaaagccacacgaagagaaatttcaagtgctcaagggccagcatggagttggggacaacagggcagcgaggcaacaggcagatggtgctgggggcctggtcagttgcagggaggacttcggcttctgctcccagggaggggagtcctgcgaggcttttgagcagaggtgggacatgccctgacctgggtgttcacaggtaccctctggctgctgcctgttcaggggctgacttgtagtggggaatgaggaggaggctggggcaggaattagagccagaggcgatggggacctgaaggccatagggacaaaaggcagtggtcagaatcaagaatgtttgggggggtggggccaagtgcagcggctcacacctgtaatcccagcactttgggaggccaaagtgggaggatcacctgaggtcaggagttcaagactagtgtggccaatatggtgaaaccccatgtctactaaaaacacaaaaaattagccgagtgtggtggcgggtgcctataatcccagcaggaggctgaggcaggagaatcacttgaacctgggaggtggaggttgtagtgatccgagattccaccaccgcactccagcctgggtgatagctggactctcaaaaaaaaaaaaaaaaaaaaatctgtttgggggcagcgctggccatagggtggggagatatagtccatccaggatgctgctccaaaaggttgtaggaagctggaaaggtgtggggtgcgggcaggtgcgccagatccacaaaaccctagggaatgtgacttggtttgcagatcactactgccctctggtggtgatcagcttgggccaccctgcattctggaggtccaagtagggacaagggagtgggtgggtgagactgaaggttgggggcttttgaggcctctggaagaagactgttccaagttgtggaacagcatgtgtgaggcgaggacccacgatggctggtgggcaaaggaccagagaagcacagctcagcccccaatatcccaccaagtttccctcccacctacaagagatgggctgcctgaacggccctcccagcagcccagagagcatctgaaatcttttattggaagatcattgctgtttgccaaatagaagacacagacagcagacgaacagtgaaaacagagcccagtgacgagagccggccccttggctggggaccctccccaactacctggtagaccagcctggtgacctctgcccttccccggacccccgggcctttggcataatgctgatggggggctgcaggcagtgaagccccttgactcaaagcagagacttgaatgggcgctggagagtggagacagtggagaggccagggagggctgggcgggccccccaggctgggccgagcagcgcaagtagaggaagtcaggagcgggcgagatggcatctatctgttttctgaaaaggggcacataggggcctggaagcaggtggcggtggtagctggggcaggtcacacactgacatccttctcatcgcccgtcttgggaacagcttccagtaatgggtccccaggacctgcctcctctccctccttggcctcgctggccttagagttggggacccagaggccagagtcaatgcagcgctgcatgtggtactttgcgtcctgtgaggagaaggcaggcagatgaggtggggccgccagccggtggtccccgttgtccccgttgtcccttgcacatccccaagctggcttcctgcctattgatattttacctatttgagacggagtctcactctgtcacccaggctggagtgcagtggtgcaatctcggttcactgcaacctccacctcccaggttcaagtgattctcctgcctcagcctcccaagtagctggggttaccgacgcctgtcaccatgcctggctaattttacttttagtagagatggggttttgccatgttggccaggctggtcttgaactcctgcccttaggtgatctgcctgccttggcctcccaaagcactgagattacaggcgtgagccaccgtacccagctggaaatttaaattttatttaactttaatttaaatttagatagtgcaatctagaacaaaagccagcaaatttttttttggtaaagggacagactaaatatttctggttccgtgagccatatggtctccatcacgactcaactctgctgtggtagagcaagatcggttgtagatgatagggaaacaattgagtgtggcttctttgttctaataaaactttattataaagacaggcagtgagtctgggagctgcggtttgcagaacctggtctagatggctatgcccatagaagcttctagaaactcagggccagtcctgcagctagacccattttacagacgagaaaaccagtgtgatcaaccagtgagccaagtggtaggaataggatcaaacagtgtcctacttagattcaacgtctattaccacttccaaaaatatagccagtgagaccttgtctttataaaaacataatttaaaaaaaaattagctagatgtcatggtgtcagcctgtaaccccagctacttggggaggctgaggtgggaggatcacttgagcctgggaggtcgagactgcagcctgggtgagagaggaagaccctgtctctcaaaaacaagtagacaaaatccaattaacagccagcgtttaccagcccctgccatgtgctcacctccctttcccacgcattttgtgagctgatattgagagaaaatgtggtttggataaggaaactgaggctggactcagtcacagtaacagtgacagtcacgaaggacatgcgctcaaagctcagcatttatctgctggatactgggatacagtaggtgctcaatatatgtgggtgtgtgccaaggtgacacgaccccccttactccttggagaagccttggaggggcactttcaccagccggcttcagagacttgggacacagggctgggggagacacacggcccgccgggaaggcatggggcgcgggggttactcacggtggggtccatcttgctgatggcgtcctgcagcatctgcacgtccttcacatcgaagcacttctggagttcctgggggtacagaggggctggggtcaggggctgggtccctgtggccctggggggtcccgctcagggtcttcctgctgcccgcctgggccggggagccccacctcagggagggactcgtagacctcgacggggtccaggccgccggggccgagccgcttcttgcgctcctcctcctcgtactccttcatggccttctcgatgcgcagcttggcacggccccgcacacgctccttgaaggcttccagctcgtcgttgaagccctccatgtactggcgatcggctgtctatgggggttgggcagtgctcactggacctggcccaacgctcaggagggactggggggcccaggaccctccagccacagctcctcagaggcgccccacggttccccaagtctattcctgacctacatgaagggctccccaaggcctgggctcccccgccggggacctcatctggcatttgccaaagaccacctgcttgggagccctgctctactgcagatctgagacactcatgtcctcagtgtccctgcatgggcacctctaactcaacatggccacctcccagcctgccttgtccttggtctccctaatctcggtaaggatagccctgttcctccaggtacgcaggttaaaaatcctagaggctaggccgggcgcggtggctcacgcctgtaatcccagcactttgggaggccgaggcgggcggatcacgaggtcaggagttcgaaaacatcctggctaacacggtgaaaccccgtctctactaaaatacaaaaaattaaccgggcatggtggcacatgcctgtagtcccagctactcaggaggttgaggctggaggatcgcttgaacccaggaggcggaggttgcagtgagccgagatcgtgctactgcactccagcctgggcaacagagtgagactccatctcaaaaaaaacaaaacaacaacaacaaaaaaaccctgaggctggcaggcacctgtaatcccagctacttgggaggctgaagcactagaattgcttgaacccgggaggcaggggttgcagtgagctgagatcacgccactgcattccagccttggtgacagagcaagactctgtctcaaaaatgaactaaaacccaaaaccctagaggcaccctcacctttgtcctttacccacatattcacctgggtaccttcagcacatcctactgctcccacatttttttgtaatgcagttttgctctgtcacccaggctgcagtgcagtggcaaaccacagctcaaactcctgagctcaagtgatcctcctgcctcagcctcccaaatagttgggactatagtactcagtcaccaagcctggcctgacctccacttttatttaattaattaatttatttatttatttatttttgagatggaatttcgctcttgttgcctaggctgaagtgcaatggcacgatctcggctcacagcaacctctgcctcccaggttcaagcgattctcctgcctcagccccccgagtagctgggattacaggcacacaccaccatgcccggctaattttgtattttcagtagagatgaggtttctccatgttaggctggtctcaaacttccaacctcaggtgatctgcccacctcagcctcccaaagtgctgggattacaggcgtgagccactgcgcccggcctccacttttaaagtctggcagaatctgcccacttctctcctcctccctggccccaccctctcctgatctaggatgcggtgactggaggggcttgagtcccagtggagaggagtcggccttacctagagcattgtgggctggttccctggggagggggcctccagccacctggcagctcagggaccctaccttaatcttagtgaagaactgccggaagcaggcccgggggtccacctttaggctcttggccagctccaggataaattgcatgacgattgtctggtgggccacctgctccatgagtgcacatttctgccaggaagaacaggcacagcgtcaccaagtggcggcctcatggcagcgccttttcacagtcccggggaaagctccactcacctcctccacctctaggtcaatgcaccaaatgaccaggtaattggctgtctcctcgcacaccaggtggacgttgtctgacaggtacttttggctgtcatcccagcggcgaagcatgcctgtgggaagatgctggcaaggtgctggagggccctggaggcaaagggcctgcctcgaccttgccccccataacccacaagccccactcaccaaagtgcttgatctgtttctcgtatttttccacgaaggtcttgtgtttctgctccctcacctcctctgagtcctcctccgtcttctcgggcttggtatttaccatgctctgtggtagggtgagagggggagtgggctggggcaaggctgcggagcgcctcgagcgcggccgggcgggccgtggtcgcagcgcccatcccatccacggcggaggtggtgacgaagccatgagcatcaaggtggcgggagcgtgggcatgggccttggggcagatcagaggaggggaccggtggggtgtttcatccgcccggccccccaagcctgtcccccctcccacgtggcccccgtccatccctcagctccccgccccccaccacactcttcaactacaccaccggggtcctcccctgaccaggcattgggtgcgcatgcgtcctggttgcaggctctctggctgcgcatgcgcactgcccgccccgcccgccccgcacaccttgctgaagccgtctttgctgagcgtgtccacgttccagggcatgctcttctccttcttgcgcatctcctccagcttctgctcccagctccgctcctccttgcgcagctgctgtgcctcggcctgcaggcgctccagctctgccttgccgccctcggccacctccagctccttcagtttcctctggcactcggccaccttgcgcttgcactcgcggcagcccctgtccagttcctccttctccttctggaactgctccatgcgttccacccgggcctgcgggcagggacggcctatcaactctggggagtcgtctgtcccttacccccgccccatacccaatccctgcaccggagatggccccaggaaaaagtacgcgtccacctcccgtgccctggtctcccagcttccgcccctgcgcccacaggtgccagcgcacacccaagtggggtcaggtccctccgtcctctgctcagaaccctggcggctcccatctcacagcagaacccaagttgtcaccacagcctacatgggccctacacaatctgcctcggcacctcccctggtaactcttccttccagctacaccagcccctcacttttctcaccttttcttgaggccattttttttgtttaagaaaacaaaacaaaacaaaacaaaaaacagggtctcactctgtcgtccaggtcagagtgcagtggcccaatgatgacatactgcagcctcgacctccctgggctcaggcgatcctcccacctcagtctcccaagtagctgggactacaggtgtgcaccagcacgcccagctaatttttgtattttcagtaaagatggggtttgccatgttgcccaggctggtcttgaagtcctgggttcaagcgatccttccctctcggcctcccaaagtgctgggactacaggcgggagctactgcactctgcggagcccacttttttcttgaacctcaaggccttcgcactggctgttccaactacttggaatgcttttccttcagagccccccacagctgactccatggcacccgtgccatctgggctccatgttgccttagcgaggaccccttccccaaccaccttcctgatgatggcaacttcccgctgcccctgtctggaattccctgcctcctcaacatcagcaaccactaacatcatatgacaattatttatcacgttttgggtactgcccccctccaatgaatgaagccctgctctctaaatatgggaacgtgttcgccattttgttcccagaaccaggaacgtggcctggtgcaaagcacgggctcagcaaatgcttgtttttttttttgtttttattttgttcagttttgtttgaacaaggtcttgttgtcatgcagactagagtgcagtggtgtgataatggctcactgcagccttgatctcccaggctcaacctgcctcaaccccaagtagctgggactacaggtgcacacaaaccaccaagcctggctttttttttttttttttttttttgagacggagtcgcccaggctggagtgcagtggcgtgatcttggctcactgcaacctctgcctcccgtgttcaagcaattttcctgcctcagcctccttagtagctgggattacaggcacgcgccaccacgcctgggtaattttgtatttttaatagagacggggtttctccatgttggctggtcttgaactcctgacctcaagtgatccacccaccttggcctcccaaagtgctgggattacaggcatgagccactgcaccagggccccttctagatgtttctttgttccacccataaccttgccccaggatcactgccaaggccctcttagctctgtctccagcccagcatgccctcctgagccccagcttggtgtctacctgcttcccgctcaccccagccccagatgtcactccccaggcactcctctttctccttataacagtgcctcatctcctcaggctcctggtccccgcctcactccctgtctccctcagacctccatctgggccccatcggattgtacaggcctctcctgagacccctgcgtggctccaccatcacctctcctgaacctcagtggaggctgctctatccagagccactaatcaaaccctgaaaccctgaaacgtgccaccaccttcaattgctgaccctctccaatccaggcacagctgccaccagggaggcctgtgaagcccatgcatttgaccacgtgaccagagtcctccccactacatcttggggggtctgaattcagatgggacttctgatcctggcatcctggtcctgggtcccaggcagatactggccctcatcgttccccgaaagtacgggctctgtcttgcctcttggcctctgcatgtgcggttcccttacctgcttttgcacccaaaactcagcttcaacagagccttccccaaatgctccctgcctgaggcaccactgatccctaaaggacctcctgtgaccatctgacgatgtggtgagggtgctggaggacagccttggggcaacggcccctgggtcctagcccacagccaccatgtaccggctgggtatcccgggccatcccctaacctcctgtaacctcagtttcctcatctgtcaaacagtcaacaatgctgactgcacaagctcatattggaagaaactaaggagatgattagagtaaaatgtcccgagccatgtgggccctcagcacgcacccttcctgtactggccagggtcattaccatctgtgcaagagaacaatctctctctctctctggggaccactctggggcctcaaaaaggaaatgtccttcaaatgcttagtttaatttctggcccagagtacacgctcaataactgggagtggttgttactacatggtcacagcacccggctgtgccactgacgggagatggaactttggccatgtcactgaaacctttcccagccttggtcttcccctctgtgaaatggagtctcacaggatcgccgtgagaactgaatgactaactctatggaaaatgcttccaaaacagccctcagtaggtgtgtcccactgttaccatctccgtccttgtcactgccacctgaatggtctgctgactcattcctgtgccttatctgaggctgtgtccccaggttctaaggcagggccaggcagagctggcccctactctaataccccaggggactgacacagccagcctgagcctcggattcccctatatgtataaggggtcaagaaggcctacgtggtcgagcgtggtggctcactcctgtaatcccaacactttgggaggccgaagcgggtggatcacctgaggtcaggagtttgaaaccagcctggccaacatggtgaaaccccgtctctcctaagaacacaaaaattagccaggcgtggtggcaggcgcctgcaatcccagctactccagaggctgaggcagaatcgcttgaacccgaggcagaagttgtagtgagctgagatcgccccactgcactccagcctgggcgacagagcatgaccctgtctgaaaaaaaaaaaaaaaaaaaaaaaaagctatacctcatgagataaacagcagctgcaggctgggcacagtgacccatgcctataatcctagcactttgggaggccgaggtgggaggatcacttgagctcaggaatttgagaccagcctaggcaacatagtgagattccatctcttaaaaaaaaaaagttgctgggtgtggtggctcatgcctgtaatcccaacactttgggaggccaggcgggcagatcatgaggtcaggagttcgggaccagcctggccaacatggtgaaaccccatctctacttaaaaaatacaaaaattagccgggcatggtggcgcgcacctgtagtcccagctactcgggaggctgaggcaggagaattgcttgaacctgggaggtggaggttacagtgagccgagatggcaccactgcactcctgtctgggcaacagagtgagactccgtcttaaaaaaaaaaaaaaaaaaaaaaaaagcagctgtggcctctccaactccctttctccacgatgggcctgtgtcaccctggagcctgcccaccaccctgcaatccgctgctgggctgccaccagtctcccctgtgtcctctgaacaactgccagggaggccgcagctaaaaaaggcctcttggagttggcgggggcggcagcctgcccagcctgggctttacacctcctatcggggaggggctgtagcaggctgggcaggggagaagccaccccagcaagcagggcccacagatgtcactaccctcctgccttacagttagggaaactgaggctcacagaatctcaatgtcatacaactcattagaagaaaccactaacagcagctgtctctgggcaggagagccggcgagctggggctgagaaaagggattcatttgtccgcttctggaaactttgaaatttttttttttaagagacaaggtcttaggccaggcttggtggctcacacctacaatcccagcactttgtgaggctgaggcaggtggattgcctgagctcagcagtttgagaccagcctgggcaacatggtgaaaccctgtctctaccaaaaagtacaaaaatcaaccaggcatggtggtgtgtacctgtggtcccagctactcaggaggcagaagtaggaggatcacttgagcccggaaggtggaagttgcagtgagctgagatggcgccactgccatctcagggtgacaaagcaaggccctgtctcgaaaaaaaaaagagagagacaaggtcttgctatgttgctcaggctggacttgaacttctgggctcaaatgatccttctgcctcagtctcctgagtagctaggactataggcatgtgccaccacatgtggctacagatttttttttttttaaccatgaacagaaattatttaaatgatgatgatgataatagccactgccccaaaaggattacaaatattaaatgaataaggtaagccttacaacaaccttatggggtggacatcattcagattctcaggtagggaaactgaggcacagagcgatcaaacagctccctggcagtcacgcagcacgtgagtgatacagacagagctgagatttgaacctagtcaggcctgtgctctgaacgacagcaatctctccttcccctccacaatgcttccttccaaacctgccccaagttttcctgacccagtcttaattcattcttacaaaggtctcagggaggtggggccatattatcccaggtttcacatgggctcagggaggcttcttgtgagtcttgccacatcaaagaaagaaagaagcagcaagaggtggggctaggattggaacccaagcttgcctgtccttgaacctgtgctggagacgctgaagccccctgcctcccttacatgccactacaaccaccggggttctcagcggcaggacaggaaaagctctgtgccagagggaggagggtgtggcaggtacactacgctgcaggaggggggccctcccacccggcaggaccaaaccattctccacagtagtaaagattaacctctttatgtgacagaaataggtcttcccaagaatagtctttggagctttgaggaagtcttaaatatttcataataaaatgttacacacggcaagaaatagaagcgctagaactttcttcccacactccagtggcttgcttggcaggtacactacccaggagactcaggatttaaggaataggtctggaagtgggactgggagctagatgaagagactaatgccgtattccagagtattctggaaggatgggaaagggaccttctagttgtttctggataaatgatggggaattgccctatgggagggtggggtaagagatcctcactagaaggttctgagaggtatatgcccttcgtttaagagcacaacatggctgggtgcggtggctcacgcctgtaatcccagcactttgggaggccgaggtgggtggatcaactgaggtcggaagttcaagaccagcctgaccaacatggagaaaccctgtctctaccaaaaatacaaaattagccaggcatggtggtgcatcatgcctgtaatcccagctactcaggaggctgaggcaggagaatcacttgaacccgggaggcagaggttgcagtgagccaagattgtgccactgcactccagcctgggcgacaagaaggaaacttcgtctcaaaaaaaaaaaaaaaaaaaaaaaaaggaatacaacagacactggtatgtaatgcaggcacactcatttggggtagcaggaggttaaacctttaagtcttagtcatcccattggctcgtgagcactgagagggtggtgggacatggatcacccaggcttgggattctggggtctggattcgggacctctgttgtggtcagatagaagaaggggtggtgaatttagaatcagaccaggagagtccctggataagagcagggacaatttgggtcacagagtagctaacaggctggggacaaaaggtggggtgggtttggggttctgggcttgagttaggggagagtttccaatgctggctgaggctcatacaggaagccagtctgggaagtgggtggtgacagggtctgcaataccaagtaggagcaggggctctggctaggccggaagccacgtgggcaggatttcctggtataatgggaaatgggtctaccggaggccaaaggagaggctggaatgtgaggctctatcgggttggagctggtagttagatccagaggggaaccagattccaaaacccaagtactcggtgagactaaggatcctgaagggggacggttctacactctaggaagggggtcctgggtgtgggcagggacaggaatatcagagtagcacagagttccttgttccgtttagaaaaggagtggcgactccggatctgaatgggaaccccggatcaagatcccggaaagtagatcccgggacagaccaaagtattgggggtccagactacggaggtgggggggcgatgggagatcccagataggaagtgaatacccgaataggatgagggatcatctagaagaatttggggtccaaactttgaggcagagttctgggtataaatgttaactgccgaacagaattagggagaacccccaagactcgtctaggggactccagactatgaagaagttctagggggtgaatagggaatcccacgcaaaaatcggagcagggagtgggggagcggagatccagggcagggactcagggtcccaatggtactggggtcccggagttgaatcgaagctcctgaaaatccagactgggggggtgagaatcctaggtgtgaacagcggggtccctgggcagtatcggggatcacaactccgaagcggggtccgggagtggggaaagggatgggcgcgcgcgccttacctgatgccgccagcggaagagactggccgtgtcgatgttggggtgcgtctcgtcttcatcatcagacacctcaatgtggtcccacacgctgtagtccaccatcttgccttggcggcccagcccgctccggctcgggtggcggcgacggcggcagcagtggagactaggagcgcggagccccgccccttccgcttccgccgagcgcgggaaaccccgccctgtgtgacgtcacatccctagtaaccgcggcagcggcactagctacccagccagccttaaagggccctgcgtaagtgttccggccccctggagttcccgcagagactccgcgtcatcgggcgctggggctccgctaggtctcctgggggcatatgagtgcgcgcttcaactccgagcccccctcatctcccgccgctccacggtgggcgtttggggtggcagggaggggacggttgatgagactgagaggactgtcccctcagccacgccgcagtgacgtctgcaaggggtagggacacggcgggaaggccctccccctgcccttcgtaaacggggacctaagcctgcgctggagaggggcgcctgatgactcctcggactttctcagcccgaggaggactggacctgccctgggggtgtctaaatcgggggtggtatggccctccccttgcagggttaaacgtggaggggagactgtggccctgccttgggagctggggtttccccgcctcggcaacagccttctccttgtcttccacctcctgccattcgcagcgaggactcgcgcgagcgcgcgcgcgcacacacacacacacacacacacacacgcacacacacacacacacacactttggaatcacccggaccccctcaaaacgggtctcggctccccaccccgctggccgctgggtgtcgctagagtctagcccacggcgcgtattcctggccccgcgcttggtggggggaatcgtggaggggtggaagggggctttccttgtcgtcacagtctggggccacgcatagcccctccccgttcgtcttggggtacgcttcctccgccggggctctaaggactccattactctaagcatgcagggcctcgaccacctcacacttccatgcatcccaatccacgctttgataccaggataataggccgtgttgcagccttgggccaggattatctcagattaaagggtgctccctcgggggtcaggctggataggaggagctccagccactccggtgaggggcgcctcttcctagtctcccctggagccgacgttggaggcagtgcctggagagagcgagcgaagttctccagaagggggaggattccccggtgcatggagcgggaagggccatcggacaaaaacgtcctcccgctgccgcccttccccctcgcgcttcattcaaacccgcgagtgggcgggcaggggcgggggagtccccatctcctacccctccctcttcccctccaccctggcagtccagcacatcagtggccgtcacggcccgggcacgcgcgcgcacggacccacaccccggcggctctcacaatcgcacacacacatacacacacacaccagcaaacaaagggtctggacacccccgtcccctcccgccccccaggccagggagggcggggcatcccctccccaggccccccgcaaggtaagcttggggctgcgagctgcggtggggagggggacacggtgccacagtgggagggggccaggaaggtagggggttccccggctccccaggaaagtcgtacccccacccccaccgtatgccctttagggattcggccccgtcatcagcctgggggtgtttggagagaatcccagatgtcggggattcccggataggcgcgggggtctcttcctggctctggagactggagctgcccagcttcagcaaaacagggttcccggagcctcagcttccagaactggggatagagcgccggaagcttccccatcaaccccaagcatttcctaatctgccagcacagcacctccagccctggggactgaggagagagacccctaagttgctttgcactgtccctctgtccccggtccccatcccacccccatcggtgcaaaccctgctatgtctctcctgcctgtgtgtgtgtgtgggggggaggtttgcgggaattgggaacgctttttggggctacctttgcttcttctgctacatcccatagccacataccactgagctgcggtggggcccggcaggcggctttgccttcctgagtctcaatttcctcctctgcaaagtgggtaatgacacacacctaggattccgcgaaatcgtgctcgcggagcctgcttttgcgccatcattttatttattagctcatttcacatctctttcccaagtgtctacttacgatgtactgggcactgtgaccaggctttggggcagcagcaaccaacaaacccagtaggggtccctgctcctggctagtgagggagcaggatccctgtataaacatacaaatccccgcgggtgatttcagactgtgaagactaaaattctgtcctcggacagagagagactagggaaaggcactcaagattaaaggagaagctgggcacagtggctcacgcctgtaatcctagcactttgggaggccgaggcaggcggatcacttgaggtcaggagttcgagaccagcctggccaacatggtgaaaccccatgtctactaaaaatacaaaaattagtcgggcgtggtggcaggcgcctgtaatcccagctacccgggaggctgaggcagaagaattgcttaaacccgggaggcggtggttgcagtgagccaagatcacaccactgcactccagtttgggtgacagagcaagactctgtcagaaaaaaaaacaaaaaacaaaaaacagattaagtaagacttctggatcctgcctgccttcctccttgggtctgagctcatgagggcaggatcaggtctagaacagtgcctggcacacagtaggtgctcaataaatgttgaatgagcgtggcaccctggtgtgagcctgtagtcccagctactcgggaggctggctggaggatcccagcgacacccatctctaaaaaaaaataaaaacaaaaaataaatccttagctgggcatggtggcacacgcctgtagtcccagctattcaggatgctgaggcaggagaatggcttgaacccgggaggcagaggttgcagtgagctgagatagtgccattgcactccagcctgggtgacaagagcaaaactcaaaaaaaagaaaatcttaaatgaattaaagaggggattagtttaagactagattctagaactgtagattaggaagaaggcttagcataaaccaatccaccccactcccttgaatttgatacaggagacagtgaatcccagaatgtcaacatttctacaaaattgaagatgggcccagcacgatggctcacatctgtaatcccgataattgggaggctgaggtgggaggatcacttgagcccaggaggtcgaggctgtagtgagccatgatcacgtcactgcacttcagcctgggagacagagtgagactctgcctcaccaaaaaaaaaaaaaaaaaaaaaaaagaaggtggttaaagcaagggttgtgaacagctgtggacagagaccagaactgagcactgtgtgcccaggaactcatggtgtccagccagtgcccactcttccccacatagcatatagacacagcactgctttcatctattcaatatttattcagcacctactatgtaccaggtgccagggacacagcaattaacagaacaaaactccctgccccagtggagctgacatttagtggaggaaactgaaatgaaataacatgatcaaaaagatataatgacacattgttattaggatactgatagaaatagagggtgtggctgggtgtttagaaagacttcctgcagaagctgaattcagcacacacacactcaaacccaaacataatcccactaatacacatcacagaaaagtggccatggggactgagtggctgagcagagatttaaacctggaacctgcatttcttttttctttctcctttttttaactaattaatttatttattatactttaagttctgggatacatgtacagaacgtgcaggtttgttacacaggtatacacgtgccatggtggtttgctgcacccatcaacctgtcatctacattaggtatttctcctaatgttatacctcccctagccccccaccccccaacaggccccagtgtgtgatgttcccctcctggtgtccatgtattctcattgttcagctcccacctatgagtgagaacatgcggtgtttggttttctgttcttgtgttagtttgctgagaatgatggtttccagcttcatctatgtccctgcaaaggacatgaactctttttccttccttccttccttccttccttccttccttccttccttcctttctttctttctttctttaattgagacagagtctcactctgtcacgcccaggctagaatgcagtggctcgatcttggctaactgcaacctctgcctcccggattcaagtgattctcctgcctcagtctcccgagtagctgggattacaggcacgcgccaccacacccagcgaattttttgtattcttagtagagatggggtttcaccatattggctaggctggttgaaaactcccaacctcaggtgatccgaccgtcttggcctcccaaagtgctcccaatgagccactgcgcccagccctcctttctttttaaagacaggatcttactctgtcacccaggctggagtgcagtggcaatcgcagctcacttgcagcctcaaactcctgggctcaagcaaccctcctgcctcagcctcctgagtagctgggattacaggtgcacagcaccacacatggctaattttttttttcatttcattttaaagacggggtctccaagagttggaggctgcagtgagctatgatcgcaccgctgcataccaacccaggcaacagcaggagacctgcctcaaaaaagaaaagaaaagagatggggtgtcgctatgttgccctcactggtctcaaactgctggcctcaagcgattcccctgccttggcctcccaaagtgctgggaatataggcgtgagctactgcgcccagcccccggaacctgcatttctaggcactgtgaaatactgttttccgctgcatcttcacacagtgacacccccacacacctacacattcatattacagtcacacaggcacagccaacctcttattcacatagaccgatgtggtattgccctgacacatagattcctgcgggtacaattcggtttcaactatgcaacacttagactcacagaaggttccaccagcccattggcacatgcacagccaggtatgaagttcatgcacatatatgcatgtatttgcacacacatgcctggagtccttcacaatccttccgagacctgcgtcagctttgagcatggagcttgggcagccgtgaatattcagggccatggtgtgggcaggggcttttattctcacttccctgttatttgctgcacatcgccacatccttctgttgaaggaagtggggagtgggcgggatgtcgggctgggtgacatcagctctcctctgccaggccaggccagtggctcccaggctgggctggtagctgacggtgctgacaacatgggtgggggaaaaggactctcgtggcctgagcctgatgccagctgtccagagcagcctgtgctgccatctggacccccatctccagcggcctgctgtccagggaaggagaaggcaggcctagaggcatccctccaccctgagcactcccgggccctgcctccctcgcctgggctgcagccagggctgattgccgcaaatgtgcacttgtgtcctgacagcagtaaggggcatgtctctgcctctctcgcctggccggctggacccctccaacatcgtcttcttcattgctttcttcatttcacaaatccttgagactttgagcaacagaatttgcagagcctagggaaaatgcacacgcagggttcctcttcaagattacaaacaataggccgggcgcagtggctcacgcctgtaatcccaacactttgagaagctaaggcaggggaattgcttgaggccaggagtttgagaccagcctggccaacatggcgaaaccccgtctctactgaaaatgcaaaaattaactgcgcgtggtggcaggcgcctgtaatcccagctactcaggaggctgaggcaggagaatcatttgaaccctggaggcggaggttgcagtgagtcgagatcacaccattgcactccagcctggatgacaagagctaaactctgtctcaaaaaaagaaaaaaattataagtctaaggcaaagaaaacacaagcagggctgggagcggtgactcacgcctgtaatcccagcactttgggaggccgaggtgggtggatcacgaggtcaggaaatcgagaccatcctggctaacatgctgaaaccccgtctctactaaaaaaaaaaccaaaaaattagctgggagtggtggcaggcgcctgtagtcccagctactcgggaggctgaggcaggagaatggtatgaacccgggaggttgaggcagcagaatggcgtgaacctgggaggcggaggttgcagtgagctgagatcgcgccactgcactccagcctgggcaacaaagcgagactccgtctcaaggaaaaaaaaaaagaaagaaaaagaaaaagaaaacacaagcagagtcagggggatgggaaaagcaacaggatatctgaggtctgaatatgttctaggtgtttgaagaacaacaaaggggctggtgggttggccagacatggtggctcacgcctgtaatcccagcactttgggaggctgaggcaggaggatcacctgagccaaggaattccagacctgcctgggcaacatggcaagacaccctctctacaaaaaatttaaaaattaactgggcgttgtggtgctcacctgtagtcccagctacttgagaagccgaggcgagaggatcacttgagcccaggcgtttaaggctacagtgaggtgtgataacatcactgcactccagcctgggcaacagagtaagacccttgtctcttaacaaaatgaaaataggccgagcacggtggcttactcctgtaatcccagcactttgggaggctgaggcgggcagatcatgaggtcaagagattgagactatcctggccaacatggtgaaaccccgtctctactaaaagtacaaaaattagctgggtgtggtggtgtgcacctgtagtcccagctacttgggaggctgaggcaggagaatcacttgaactcaggaggcagaggttgcagtgagctgagattgtgccactgcactctagcctggcaacagaacgagactgtctcaatttaaaaaaaaaaaggggaacagaaataaattcacgtgcattacttcacttcatcctcacaacaaccccatcagatgggtgtgaatattattcctattttacagatgacaaaactgagggccagagaggctgagtaatttgctctaaagtatacagacagagctgagagatactgtgagttgagttctagactaccacaataaagcgagtatcacaataaagtgatacaaaaaatttttggtttcctagtgcatgtaaaaattatgctgacactataccatatgtatattaagtatgcaatagcattatgtctaaaacaacaatgcatataccttaattttaaaatactttattagcctggtcaacatagtgagacctcatttctacgaaaaaaatttaaaaattagctgggcatgttggtgctcacctgtggtcccagctacttgggaggctgaggtgagaggatagcttgagcccaggaggacaaggctgcagtgtgctatgatcacagcactgcactccagcctgtgcaacggagtgagaccctgtctcaaaaacaaaacagaaaaaccttaaaaactttattgctgcccgggtgtggtggctcatgcttataatcccagcactttggctgaggcgggcagatcacttgagcccaagggtttgacaccagcctggccaacatggtgaaaccccatctctaccaaaaaatacaaaaattagctgggcatggtggtgcacgcctgtagtcccagctactccagaggccgaggcaggagaatcgcttaaaccccggaggcggagattgcagtgagccaagatcacgccactgtactccagcctgagcgatagagtgagaccctgtttgaaaaaaaaccaaaaacaaaaacaaaaaaacctttcttgctaagaaaagctaaccatcatctgagccttcggcaagtcataatctttttcctggtggagggtcctgcctcaatgttgatggcttctgactgatgagggtggtggttgctgaaggttggggtggttgtggcaatttttaaaaataggagaacaggtcgggcggtggtggctcatgcctgtaatcccaacactttgggaggccgaggcaggtggatcacttgaggtcaggagttcaagaccagcctggccaacatggtacaaccccgtctctactaaatatacaaaaattagcctagcgtggtggtgggcacctgtaatcccagctacttgagaggctgaagcaggagaatctcttgaacccaggaggcagaggttgcagtgagctgagatggcaccattgcactctagcctgagtgacagagcaagactcagtctcaaaataaataaataaataagataataataataatacttgaaagtcaaatgtactccttgatcagtgggctgcagaatggacgctgtgttagcaggcatgaaaacatctccttgtacatctccatcagagctcttgggtgaccagttgcattgacaatgagcagtcatattttgaaatgaaacttttttctgcacaggaagtctcaactgttggcttaaaatattcagtaaacagatgtgctgtcacccaggctttgttgttctatttatagctcagaggccaagtacacttaacatcattctaaaggtccccaggattttcagaatagtaaatgagaattggtttcaaccgaaagccaccagctgcattagcccttaacaagagtcaggctgtcctttgaagccagtcattgacttcacttctctctagggtgaaagtcctagttggcatctacttccaatagaagactattttgttgggcaggcgccgtggttcacgcctataatcctaggaattagaaaccagacggggcaacatggtgaaaccccgtctctataaaaatacaaaaaattaggtaggcgtggtggcacgcacctgtaatcccagctactccggaggctgaggcatgagaatcgcttgacctgggaggcggaggttgcagtaagctgcaatcttgccattgcactccagtctgagcaacaggctcttcccatccccctgactctgactcagaaaaaaaaaaaaaaaaaatagaccaggagctgtggctcacgcttgtaatcccagcacttcggggggctgaggtgggcggatcatgaggtcaggagatcgagaccatcctggctaacacagtgaaaccctatctttactaaaaatacaaaaaaaaaaaaaaattagccgggcatggtggcaggtgcctgtagtcccagctacttgggaggctgaggcaggagaatggcgtgaacccaggaggtggagcttgcagtgagccaagatcgcgccactgcactccagcctgggcaacagagcgacactccatctcaaaaaaaaaaaaaaagactattttgtctacactgaacaatttgttgttgattgtagccaccttcatcaataattttagctagatttcttctgggtaacttgctgcagcttctttctctctctttttttttttattaaaacatgtttactttttaggccaggcatggtggcccatgcttgtaatcccagcactttgggaggtcgaggtgggaggtttgcttgagcccaggagttccagaccagcctaggcaacatggtgaaactctatcactacaaaaaatacaaaaattaaggccaggcatggtggctcacgcctgtaattctagcactttgggaggccaaggcaggtggatcatgaggtcaggaatttgagatcagcctgaccaacatagtgaaaccccgtctctattaaaaatacaaaaaattagccaggcgtggtggcaggtgcctgtaatcccagctactcaggaggctgaggcaggagaatcacttgaacccgggaggcagaggttgcagtgagccgagattgtgccattgcacttcagctcgggcgacagtgcaagattctgtctcaaaaaaacaaacaaaacaacaaacaaacaaaaacccaaaaaacaaaaattagctgggcatggtggtgtgtgcctgtaatcccagctactcaggaggctgagatgggaggactgctttagcccaggaggtcgaggctgagggccacaatgaatgggtaccatttcttgctctgtttgctggagaatacaggttacaatcagagtggtgagtgctttaatgggggtagaaaaacctgcagtgggggcccagaacatggactggggcagtctggctgaaaaatggaggtgacctttaagctatctttttttttttttgagatggagtctcgctctgtcacccaggtcacccaggctgcagtgcagtagcatgatctcagctcactgcaagctctgcctcccgggttcacgccattctcctgcctcagcctcccgagcagctgggactacaggcgcccgcccccgggcccggctaattttttgtatttttactagaggtggggtttcaccgtgttagccaggatggtctcgatctcctgacctcgtgatccgcctgtctcggcctcccaaagtgctgggattacaggcgtgagccaccgtgcctggcctaagctatctttatacattcatccatttgttcaacaaatgtctgttgagggcccaccaggtgctaaaggctaggttgaagaaatgatgtttacattagtttccattaatttacattgaactgaagtgctagctaaggcaataaggcaagaaaaagaaataagaaccagactgagcatagtggttcatgcccagcatgaacatgggttcatgtaatcccagcactttgggaggctgaggtgtgaggagcactttagtccaggagtttgagaccagcctgggcaacatggcaagaccccatctctacaaaacaacaaaaacaaaaattagccaggcatgatggcgcgtgcctgtagtaccagctgctactctggaggctgaggtgggaggatagcctgagcctgggaggtcgaggctgcagtgagctgtgcaatggtgccactgcactccagcctgggcaacagagtgagaccctgtctcaaataaataaataaataaataaatattaaaaaaaataaagaaatgagaactaggctgggtgtgatggctcacacctgtaattccagcactttgagtttgagctttagtttgagctcaggagtttgagaccagcctgggtaacatagtgagaccccagtctctatttaaaaagtagaaacaaaagaaccaaagtaggggataaaccagctagtacacagtagaactgttaggaacattacactatcaggctctcaataataacctgacattgaacaggttattaaaagcctattatgttccggattctgttcaggacgctcaggagatagtaaagaataatactacattattgttaacataataattaaacaaagttttcgtgccctcctgcagctaatattccagtgtgaggagacacagacaataaatgtaataaacaaattacatagtgtggtatgaggggggaagagcgggaaaagggggaccagaagtcctaggaggttgtattataattttaagtgggggtggggtaagaaagaaagaaatgcctgaaaggatgagatataagcaaagacctaaaagaggtaagggacctgcggattttttttttttttttttttgagatggagtctcgatctgttgcccaggctggagtgcagtggcccgatctcggctcactgcaacctccacctcccaggctcaagccagtctcctgcctcaccctcccaagtaggtggaactacaggcgcctgccaccacgcacggctgatttttgtatttttagtagaaatggggtttcaccatgttggccaggctggtctcgaactcctgacctcaagtgatccacctgctttggccttccatagtgctgggattacaggcctgagccaccgcatctggccaacctgcggatatttgggggaagagttccaggtggacagaactgaaagtgcaaagggcctgaggcaccagcatgcttgctgtgtccagaaacagctagaccagtgtggctggagctgagggcaggaaggtgactgggcgttatctagcaggactgtgtgggccacgcgaggactttgacgtttcctctgagtgaggtaagagctattagggctctgagtagaggaagatcatgatctgaatcgagttctaacaggctcccacagggtcagatgttaccatttattaaatatttactgagtgccagacactattctgttcaatatggtttgatctcatttcattctcacatggaccctgtagggaatatcattccatttcacagaaaagaaactgaggctcacagagtttaagacactgacccatggccgcacagcaataatcttcagcgcctgggtgccaaggtaaagtaagccagcctctccctcccccaagcatttcagacaaggatcggtggctgcagagcgcacccgtcttcgggaacggcgtctgtgtccctgtctgtctgtttctatttccacacgtccctgtctgtctccacgcgcctctgcctgtgcgtcccccatctgtgcccaagccgccgtctctctgcgcccggcccccgcacatcggagctatttcgggtttaaggcttaaaagcccaacagctcggaggagacgcttcctccggcccccggctcggaccacgcgccgcacgcggccagctctgggagctcccagttttttctgcgggatccccgagccggggaagcccccgcgggaggaagggtgggggctggggcgacccgggcccggaggctctcggccccccagtggccaaccccggcattgacgccgtcaggagcccagccgtgcgtcagctgtcgccctggcaacgggggcgacgtcaccacattggtggtgcgtcagtccgctgacgtcacgccccaggagaggcaataggcaagtggcgggggcgggttctaggcccgaccggcagggggagccctggggcactgatggcagatgcgtttggcttggtcttgtaggaggccctggccctgccgacatggccaccgcagtcccaacggcgcgctaggttggcgagatgaagaggagtcgcagtgccctgtccgtggcagggaccggggacgaggtgcgagaggaggggcttgggctaggggcggggcttcgccccttgggggagactagcgccctctagtgaccacggctatttcctgaacgtggcttcactacctccaagctgtgaggagtttggtcccctcgtgcctcagtttacccccttgattccattttttctcctgctgccctaagaggctctcagccggcccagggacagcaggcaaaggcttctcaaatgaggagaggattttggcgaggaggtgggagggggcgctaggggtggtgaggtcttgagagtctcagatgtgagggatgggaggggggcattgacattaagaccaagaggggccctcttagacgtggaggttgggaagagaccctaaaaaggtgatgtgttagagaggtctcacacttgagacagaatgtctagatgtgacagaccccaaggctggggcatcgagaggggaccccacaaaaattatggctgagaaggggcactctcagacctaagggatggcagggcaccctctgtgtgaggggtcagcgagtggctcacacgtgaaggggagcctataccgccattaactactcccttagacagctaggtaggggtgttcttggggagaggggctcagagcttcccagccaggccacgcccctattccactttgtccctccccagaggtcgagggagacccccgaatccgaccgtgccaacatgctgggggccgacctgcgtcgccctcgccgccgcctctcgtccggtcctggcctgggctgggcccagcctgagccctcggaccctggggtccctctgccgccacggcccaccaccctgccgctgctgatcccaccgcggatttccatcaccagggccgagaacgacaggtaggtaggagagggagcagagtgggaggtgggttggggaggcacagtgccaactgggctaggtccagccaccagcccttcccgatctccatgctccctgccgtttgcaaaactagctgcaacttgtcctgtggcgggctgtgacacccctaccccaaggcacccttcgcaggctctaggaaccccttatttcattttccagctgcctgagtcagcaaggggcaggactgaggaaaggggtgtcatgtctccagcccccaagatgctcccatattcacagagctggggcaggttgatcaggcggctgtgcaccggctttcatgtccccgcctgggaggatcaggtttcttctccgccttgaaggggatggtggagtcttggaaggggtctggactagtatttttctttctcctggggagatgtgagaaatatctgcgagctctgggttcacacagcacctcctgctgattctcatctggggaccttccaggtacccaaccagtttcccagagtactcaacccccctcttggctcaagaatgagctggaaagtcagacagctgagctggtcctggcttctggccggcccctgcccccatgccctcctctggtcaccgctttcggcagttccaatccacccccacccccatctactcaattggagggttccagggtctctgtttccgtcatggtccaatggttcatttccagatagggagagcaagtgactgtctctcgcccctggagctgcttaattatacctctccacgcccatcccactagcctcaggtccagatcagtttatcccccagctcaggccaccgctcctcgtttcctccttcttctgcaaccccagctgtgtcctgacacccccacccacctcacattacgcactcccacccgcttccagatctctaaccaacgttacagcataccccgccaagaatttggcccagcccaggactctcaaatatgatctggggagaactcacagcccctgcaaattccctagaagccgttttgagtgtgtaatggggggggtgttcctgagagaagtggggaacacagttttggcccttggaatacccggcggctgctgatgggggggccggtttttgctcggcgttcgcccacgccgggagccccctctggcggggagaaaagtggctgtgggggttgaagaccggcagtcttttttttttttttttttttttttcaaataaggagaagggcgcggggggagggcggtggcaaacggcatcgcgtgccctggggagcccgtgacagggggcgcacgggggcaggggtctggtccccgggtcccgcagcagagcagtttcgcgttcgagctcttatcggcgtggggggggggggcggtgggacacgcgggcgcgtgcactccccccgcccagcagccatccttgggggggttgagggggatgggggcgcactcggatcccgctcgctctctgcttgctcgctcggcgcggcgctgggggaggcgggagcgtgagtcacggcgactcccgatttaggtgccggaaggggggctctgctggcgggggccgcagggaggaggctcgcctgtttactcgcctgaaaagggcacgggggtgcgctccgcggctacctgggaccttcctcagtttacctctggcagaagcgctttagaagaggcagcgatgtatagagcggtgggccggcagctgcggtatccgccacagggtgtcttcctggagccacaagggaaccaatgggacacaccccagaaacaccccagaggccccaggccgaccacacacatacactcacgcacacgcacacactaacatacatagacgtcctccgacactacagtcagacgacagaggccgaatcgcgtgcacaactccgcaagcacacaccgaccacaaacgcatccaagcgcttgagaacacattcacagtccccaggccacctgaaaaaagaccacgtagggatgcacatcctccaaataggtagcacatgtgcgcacacatccttcacccacagacacacacagttatacacacagccaaatccagagaaacgggcagacaacagcagccaaccacgtgcgcacacacacttccagccgacactgaaaacacagacaaccctcggaagaggccacgtgcgcgcacatcccgccccgggcccgcaccatcactatcctccgacgcacagacaggagatcccacacactctgccgccgcccgctgcaggtaccgcgccggtggcactaggaccactcctcaaaaactgccccccgccaggggtagcggcgaggacacgccaacaccggactccgccctcgccatgatggaccgactgactgacactctggcaaccagtccggtgtctgcttccagatcggattaaccgtttaactccttcgtgcctgtgcgcgccgcggccaagcagggtgctttgaagacagacgagttccagcgccccctcccagcccggagcggggatctgcgtgggcgggaagggcccccctccttaggtagctgccccccgctggcccggacggaggaggaggggggcggcgctgacagccgcggcgggcggggggcggggaggggcgggacggggcggaggagccggggctggcgccgagcgggccgcggaacgcggagcgcggagcgcggagagcgccgccgggcactgagcagagctccaggcgccgaaaggaagctgcagagcccggcccgggggcgattggcccgcagcgcccccgggtctgtccccggggcgccatggccctaccgcggccgggcgcacccgcggggccctgggctcgctggcttgcgcgcagctgagcggggtgtaggttggaagggccagggccccctggggcgcaagtgggggccggcgccatggaacccccgaccgtcccctcggaaaggagcctgtctctgtcactgcccgggccccgggagggccaggccaccctgaagcctcccccgcagcacctgtggcggcagcctcggacccccatccgtatccagcagcgcggctactccgacagcgcggagcgcgccgagcgggagcggcagccgcaccggcccatagagcgcgccgatgccatggacaccagcgaccggcccggcctgcgcacgacccgcatgtcctggccctcgtccttccatggcactggcaccggcagcggcggcgcgggcggaggcagcagcaggcggtaagactccccgcggcggatgcgcgcggaacggatgggcgcgcagggaggaggcaactcgagctgccggccgcagggggcgctaggatgcgggtggggtcggtttggctggcgggggcggagggaattcggctgcgggggcgtctgggacctggcccctggttgtgcgctctacgggaggcttcctgctgaagcccatcctggggtccatttagggggcgccacgctgcgcgtggtgttaacgaggtctgggttggggaagggggctgcacacttaggggtctgtattcttggtgacagtgcagaacagctgctaagctgggaaccacttggagggaccttcctgggggcactatactgagggctagattcgcagtgtttggggtactcttggagcactccataagggggtgcctgctaggaccaggatctttacttcagggtggggtgctctcagggtccttctaggggatggaggactctattgcggggatgttagtggactcctcctgcagcagctggggtcagaaatccagagggtgcctcttgggggagcactgttttgggagccttgcgttagattggagttcccctctcagggcaagagtgttagcgttaagtagctgttcagaggcaggaaacagtggagggggggcgcagtcccagcacagagggaaggagtccctgactgcagaggtgacagcatagtgagggtgcatgtgtgttgagcttggtctcctctgagggtattctccgattgacctccgtttgctccagctgtccgggtatgaccagctgtggctacctcagttgtgtgctctgtgtgagcttctggggtcttgtgatggtgacacgatgactctgtgtcctccagggacagtgtaattgtgacagtgtgactgtgtatttccagggtagtgtgactgtgtgtttctgggacagggtttgcgacagtgactgtgtgtgctccaagaatgctgtgactgtcacagggtgactgtggcctcatgggatgcagtgattgggatagagtgactgtttctgctcctaggacagtgattgtgcaatggtgttggtggtctagggacaatgtgattgtgacagtgtcatttctggcatgcagtgattgtggcactggggtgtttacacttggggaacaatgtgattgagttcgtggaacagtctgtgctccttggacactgtgattgaaacacagtggctgtgtgttagtcttcaccaggtgctcacgtctgagcgtcggtgctctgacatgtggtctgtgttccctctgcctggtgtatcctaagaactggtgtcctctaaccacctggtgttcttagttattgttcctcctctgatggtgctccagggtctgattgcttgtgctccagcgatgtgtgcaactgacagctttgcccgtgtgctctacctggatgccccactgctggggatatcaccaagacggtcagatttgggctccttatccctggagctcctgagtgaggcctctctaagatgtagccctactcttcctaagtctctttgggggtcttcagcagtcattgcagccctccaggccacccccacctctgttctgatcaccccccagccccagtccccctgcacccttctacccaccaggaagcaagtgtcacgggcccagcatacatgggctgacatttcccaaagggaactggagagaggctgaaggaagagaaagttggaatcaacagaaaatgctaaaactggggcagggggccaaactggcacaggtcactgtcctaagacaccaaggggtgggtgaagtgaagtaggttccaggccccatttctttgcaaggctccagggactcctcctagcctggtctctggggcactgagtcttaggggacagtggctgagtggtaataatcatcattattttggtgggtatccatctcgcaatggctcaccctccggctccatgccagggacttttccatatgcatcctcatccccagtgccctgggtattccagcagggtattcctgctggcatatggagaaactggagcccagagacaaaaccctttctcttttttttttttttttttttttgacagagtctcctctgtcacccaggctggagtgcagtggcgtgatctcagctcactgcaacctctgccttccggattcaagtgattctcctgcctcagcctccggagtagctgggattacaggcgcccaccaccacacctgactaatttttgaatttttagtagagatggggtttcaccatgttggccaggctggtctcgaactcctgacctcaggtgatctgcccaccccttagcctcccaaagtgctgggattacaggcatgagccactgcacccagctaaaccttttctctttctcacccaaactcacacaaccaggagatgggggagctggaattgcaacgcaggtccgcccaattcctgtgcatctttgtataagtgtcttgccctctctgagccttaattttccagtctgtagagtggggcttttgttggcactgccatgtgggggtcactttgagggttctgtgagcttggagatgtgtgtaaaggacttaacataatcagtagatctccattcagggacctggactaaggaggggggacctgggtggatcccatttctccagggtgagtagaaaaaaacaggaaccttaaccacatccccacgtagactcgggtttctgtttcactgtgggcctgtgcacccttcagtgtctgtgctgaggtccaaagctgggactgatgggtgggctgtagctggcatcagtgccagggtcctcccccattcccagggaaaaggaggaaggtgtctgatggcaacctcaatgcttagaacaggcatttcttcaaaaagggggtttttaccagggcacatacaggattcagtgctccccacactggagttcatccagctaccgcaaaaggagtccagcgagctcccccgatttgggtcaaaggaatccccagagagagggcactgcccacccccaaccggagatgtcatccaaacctcccctccagacctgaagatgtatgagacggctgagtcacggcacagccacgatctgtcaagaggcagatggagagggaggaagaggaggactttggtggtgggggtggggagctgtctgaactggggacggggccaacatacggaccctgcgtcccccctccctgggccctaaaacttccccatcgaggtgggggcacagtgtggccccaggagcaggtggaggcagccgagctggggtatccgtctggtcgctggtctctgtctccacttgggtcctcgcctcccccttgtccctggcgctcccaagtccctggatgtgggttgggagcgggtctccccgcgcgccctctgctggacgacgaggaaggcacagcctgggtgtgcgctccgagcgcggacctgctccagggacgccgccagtcccggagcaaagcaaagtcgccgccaccgtcgcggcgcccggtattattattttatgcttattgagcgtcctggagagcgggcgccaggccggctgaccgcaggctgcgtgtggggtcctcgccctcccgggcttgggaccaggccgctttccccatgcgccagcccctgccacacgctgcggggactgtcgtctggaggacagggaggaacctggccgaaaagttgcagccgtggagttcccgtcccgcctctgcgcgcttgcccggcaggccggtgaaccccagcatccttggctctgcgcttcctgcccgggaaacagagaccatgggacttgcccaaggtcacacagcgaggaaggtgagaataggagttaaaaaccagatctcggccaggcgcggtggctctgtaatctgagcactttgggagaccgaggtgggcggatcacgaatgaggtcaggagttcaagatcatcctggccaacatggtgaaaccccgtttctactaaaaatacaaaaattagccgggtatggtggcacacgtctgtaatcctagctactcgggaggctgaggcaggagaatcgcttgaacccgggaggcagaggttgcagtgagtcgagatggcaccactgcactccagcctggcagcagagcgagaccctgtctcaaaaaaaaaaacaaaaaacaaaaaacagatctgctccactgcagaccgctgggtaacattcacatggcagccctgcccgctgactcgctgtgtgacttggggtcagtgcttgtgcctctcggagcctcagtttcctcatcagtcaaacggggctgaaaaataagaactgtccacccccagggctgtggtgaggctgatatgtttgacgtaggtgctgggcagccaggagctggtgttctgagaaagtacttcctcaaatgacatcagcagagagaaagggggcgtcccccaaaccgcaaacccggctggtggggaaggtgccccatatttcattggtaacagattgactgcaggctcttatgactttaggaaaactggggctttggacctgggagagccacagtctggcagggtgagaacagaattgtgagggcatctgagcccactcttttcattgtggagtatgaaagagttcaaatctggctgggcgcggtggctcatgcctgtaatcccagcactttgggaggctgaggcgggtggattatttgaggtcaggaaattgagaccagtctggccaacatggtgaaaccccgtctctactaaaaatacaaaaattagccaggtggtagtggtgcatgcctgtaatcccagctactggtgaggctgaggcaggagaattggttgagcctggaaggcggaggttgcggtgagccgagattgggccactgcactccagtctgggcgagagactgagaccctgtcaaaaaaaaaaaaaaaaaaaaaaaaaaaaaggaaggagggaaggaaggaaagaaaagagttcaaatccacttttggccaggcgaggtggctcacacccagcactttgggaggctgatgtgggaggattgcctgaggctggagtttgagaccagcctgggcagcatggtgagaccctatctctacaaaaagaaaaaaataaaagaagtaaatccagcttttgtcctggactcgctgtgtgaccttcacctgtcagagcctcagtctcctcatttctagcagattcgttcattccacaaacactgagcgccttcagaactgtggctgagaatgctgtagaccaagtttgtccaacccgtggcccaggatggcattgaattcggcccaacacaaattcgtaaactttcttaaaacaatgagattcttttttttttccctctcattagctattgttagtgttagtgtattttatgtgtggcccaagacaattcttcgcctttcagtgtggcccagggatgccaaaagattgcacacccttgccatagacacattccctgctgccctgaaattgtcagactagagggtgaagcagaaatagcaagtaaagggctgggtgcggtggctcaggcctgtaatcccagcactttgggaggccaaggcaggtggattacttgaggccaggagttcgagaccagcctggccaaaacctggcaaaaccctgtctctactaaaaatacaaaaattagctgggcgcacgcctgcaatcccagctacttgggaggctgaggtgggaggaggattgcatgaacccaggaggcggaggttgcagtgagccgagattgcgccacttcactccagcctgggtgacaaagccagactccgtctcaaaaaaaaaaaaagaaatagcaagtaaagctgtatgataattcaagatggtcacacataggatatgaaaaaaagagggatcctgaggtcagggaaggcctctctgaggaggtgacatttgaacaaagacccaaataaaatgagggaggtaagggccgggcgcagtggctcacacctgtaatcccagcactttgggaggccgaggcaggtggatcacgaggtcacgagttcaagaccagtctggccaggatgttgaaactccatctctactaaaaatacaaaaattagctgggcgcagtggcaagtgcctgtaatcccagctactcaggaggctgaggcaggagaactgcttgaacccaggaagtggaggttgcagtgagccaagaccgtgccagtgcacttcagcctgggtgacagagcaagactccgtctaacaaaaaacaaaagagggaggttgctacatgggtgtctgatggaagagggtgccaaccagagggaagagccagtgcagaggtcctgtggtgggagtgtgtctgatacgttggaggcaagtgtgtctgaggcagagtgagcgaggaggcagtggaaaaaaaggagggagcgaggtgacaggcagctcatgtaagggctcatagaccattaggccatgatcaaggttggctttaggcctcagtttacatctggcttcctaggacgggacaagcatcattgggctggaaggaaactcatccataaagggcttgtgtagcctcatggctaaaattcctgtctctgaagccagacagctgggtccataatccagctctgatctttctagattgggagaccctagccaagtcactcctctctgggccttggcttccccgtctctgaaatgggcctagtaaaaaccgtattcccaagggctgatctgacgaactggcaaaacaattcagggaagctaagggcattgaaaccttggtcggtgaacaaaaatgcatttctgggacaggtatagtggctcatgcccaacacactttgggaggctgagagggaggcggatcacttgagcctgggaggtggaggttgcagtgagccaatatcatgtcacttgcactgcagtctgggtgacagagtgagaccctgtcaaaaaaaaaaaaaaaaaaagaatatcacctggtgggtgtctggtgggtactttgtgaggattaaatgagatcataagaccaagtgtggtggctcacgcctgtaatcccagcactttgggaggccaaggcgggcagatcacttgagtccaggagctcaagaccagcctgggcaacataggaaaaccccatctctagaaaaagtacaaaaaattagtcaggcatggtggcgcacatgctactcagctacttagctgctcaggaagctgaggttgaaggatcacttgaccgcaggaagttgagactgcagtgagctatgatcgtgccactgtactccagcctcgatgacagagtgagatcctgtctcgagagagagagagagagagagagagagagagagagatattgagagagagagagagagagagatcatagctagaggcactggatgcacaggaagctttctaaagggttagttgctatcatcaccatcatcgtcattatcatcatcatctataccctctagctagtatagtgatttgcatattataagccttcagtaaatatttgtcaaatactgataataactgtagctcatattgagtgcttactaggttcagacacttttctgagctttttatgtgtccatccatggggtgagtggtagtattatacccattttacaactggggaaactgaggctcaatgaaatgaagtgactagcccgagatcaaatggctaagaagtgccagaggccacacgcaagcccaggcttcctcactctgggccccatggcatcagagccaacactagagaaggaaggatatttcacagaggtggactcgaaaatagagattcactgttgggcgcagtggctcacacgggtggatcacttgaggccaggaattcgagaccaacctggccaacatggtgaaaccccatttctactaaaaatacaagaaaaatttgccaggtattgtggcacatgcctgtaatcccagctacttgggaggctgaggcacgagaatcctttgaacctagcaagcagaggttgcggtgagccaagatcgtgccactgcactccagtctgggtgacagtgagagactgatgaaaaagaaagaaagaaagagagaaagggggaaagggaggaaggagaaaggaaaggaaaggaaaggaaggaagaaatgaaggaaggaaggaaggaaaataaggaaaggaaggagaaaaggaaaagaaagaaagagagggacggaggggaaaggaaaggaaaggaaagaaggaaggaaggaagaaagaaagaaagaaagaaagagaggaaggaaagaaagaaaagaaaatagagattcaccctcttttctcttttttttcgtgagacagggtctcactgtctcaagatggtttagtggcaccttcataactcactgcaacctcaacctcttggctcaggtgatcttcccacctcagcctccaaagtagctgggaccacaggctcatcccactatgccctgctaatttttgtcatcttttgtagagatgggatctcgccatgtcacctgggctggtctcgaactcctgggctcaagtgatccgcccaccttcacctcccaaagtgctgggattacaggcatgagccaccacacctgccttctaggggtgtcttaagagttgtaagacacatctcagaagctgtgggtggcattctaggttgtccccaaggactgtggggtgcatcttgggattctgttctagggtgtgagactgtcttaggagctggagaggaatctagttgtgtccctggggtctattggggcaccccagattttgctggcatctccatggttactagggcatcccctgagtctgaaggcattcccgaggttgtcttggggtctcagcacttgtgggggcatctcagagatgctgtagaaccattcagggattaagggacatctgagggactgtggaggtgttcctggggtctgtggagaactctaggatttggtgggaacctatattcggtctatgaaaatggctctgtgggtgtgggggattctgggggtactgagggagggtctatgcatgatgggatgatgagagttggggatgatggggagctctggaggaattttgggacatctgaggaactgtggtgggggttctgggatctgaagggttttccctgggctctcagagcaccactggcagggagtttgtgggagtgcccccagagatttgggggcatccctggcatttgtggatgcaccctgggattctcagggcactcctggggcttgtggcatgtcccagaaacagtgagaatactgctaggattatgggggcatctggagagctatgagagtgccctagggtttatgagggtgtctcagaacacctctaagttgtgctgagaagccccgggatttgggggggtacccctggacttcttgtgtggggttgtctcagggacaatgagggtgctccttgggattctgagagactgtggggtggctcctggggcttgtggggcctgtcaacaccacggggagtttgcaggagtgtccccacagatttgggggtgtccctggtgtttgtggggacgcgtccggcgattgtgaggacattagagccaacgcgggcggctttggggtctgcgggagagtccccaccagagccgtgcgggcgccccagacccgccccgccctgggggcggctccagcgcgaagccggaagggccgaggcgacagggcggggtggggcccgcgggcccggggctgggcaggcggcctgcgtgggcctggcggggtgggcggcgcagctccccagcgcccgccgaggcggggccgccccgcggccatggcgcggccgcgcggcctaggccgcatcccggagctgcaactggtggccttcccggtggcggtggcggctgaggacgaggcgttcctgcccgagcccctggccccgcgcgcgccccgccgcccgcgttcgccgccctcctcgcccgtcttcttcgccagcccgtccccaactttccgcagacgccttcggcttctccgcagctgccaggatttgggccgccaggcttgggctggggctgggtaagtgcagcgctggtggccgtgggttcaagtcgcccctggccacctggcgcactccagggtctagggttcgtggctcactctctccagcctcactttcctcttctgtcacatagcagcgatcaaaatcatccctgaccgccagggttgccctggagacctctgatagggcatgcagtagacgtttaataaatgttgcatccttcccacttcctgtgcaaacctgaagctgcggtcacgctttggaggagtgagggcgacctgccatccaggtcatgtgttcatcctggggtatgtgttcagttctgtcagcctcagtctactggcctgtgaaatggggccagtcatgccttctgtgggtggccttgcggtgaggcttggtgtcactcctagtaccgggccacagagggcaaatggaagttccctttctggccagacggggtgggctgcgggggcttgaagtctgggagtgacaggccccgaggccacatccagtctggctttctaatgtccttatatcctggaggcagaagttggcagcccggagttgggcactggctggccctgggggcttctccgggtcctcagcctccccctcttccacctactttccacgtgcaattgaggcacagactgaaggagggcacggcggggcaggaccgggcccagcgactggccccaggaacgaaatggggcggggacagaagaggaagaggggccagggcctttgggagccccgcgtggggtccgcagggtgtgtgtagggaaatcgttgcttctctccgggtctctctctctgcgtcctgcgtctctgtctccacttctgtctcttctgtctctgttttgtttctccttcccaccgctgagctgcaccttcccctcccctgggtttatgtcacccggccccacactcgagtcccgtttccccgggggcgcacggcgatcagcgatcagagacctcgagcgggcccagctcgacgtcagggcggggaggggggaaaggcggggccggaggcggtggcaggagggcgggcccggagccgggaaaccggagccccggggcaccccagaggcctaggagggaggagacgggggggggggggggaagtgtgcgtccgactccgcaggacccctgcagggggaggcagacagagcgcccgtgcgctcccctcccccgtgcagacccgggaacgctcgaccgcccggggctgtccctgggggggtcaccagaggcgtggaggcggtgccggcagtggaggccgcagacaccttgggcctggccagcagcgcgcgccacaccgccctgccgccgtccccatgcgcgccccgacgacggcgcttggctcccatgcgctccggtgcagcgccccgggcccggccccggccccctgccctggcactgccccccacgggccccgagtccctgacccacttccccttcagcgatgaggacacccgtcggcaccctccgggcagatctgtcaggtgggtggcccgtggccagtcagtcctctcttttaatactgaagggcactggctgtgctgggggggtgggggtgctgagtctacctgggtgagtcccctaagtggcttccaggatctggctggggccccaccccctttcctggctctaaaggcctggggtgctgctgagggcttcttgaaggtggcagccctcaaagtgggtgctgggtccattcctgcctatccaaggtaggacccgtcaccctctttgtgtccttaaacctgagcttctggcattcactttggctgcaaatatgggtgtccagcgtcacctgggctccactcccaggccactggcctagaaccagatccctaagtccctgcctggctcagtgtctccagccttaccttccccaccccctctcatgctggagctgccaggctgaaaaccaagctgggttgggggtggggaggggagattctgggtctcatggagggtgtttagaataggctggactgagctggggctgtgagtggcctttaagttctcagaattctcaggggtttctagccttgttcttgctttcctgctccatggtctctaacacagacacacacacagggccgcacacagggcaatccgggtcacctggtgtttaccgtactaggtatgggtctcctggctgcaccaagaggaccctgcagttgactcatggccacacacaggtgacacacagaccacagcaaccctggcccagccctcgcacatcctcgtctacactgcgttcctccacagtgggggacactgtattttggtgagacacattctcacaaaaatacacacccagggcccacacatgttcctgtatgctgtactcccacctgcaccagatacacacaggaacgcaccccgtgcccacacaggggtcagggactgtcacagtatcagtgcgacacggtctcataaagtcacccagactcagaaatacacagataaagacacagagatgcacacaggcacccatgagcacccagcccctgctcacacaggcagatgtgcgatgccacagagatgtctatgtgtgatgcccgggggcacacagacctccctctcccccagtctcttacatactcagccccccaaagagctgtgtcacctggcactacgcgcctgcctgggagacacacaccagcacccgccttcaacctccatgtgaccttcacaaagcaaatgccaggcctttccataaaggctgcctggcaccacctacaagtgagtcaggtggaaaagcacggggagccgggggagacaccaggcctgcctgccctgtgcgccccgggggaagacactcgtcgcagctttgtagctcagctgcctgggttcaaatccacattctaggccgggcgtggtggctcatgcctgtaatcccagcactttgggaggctgaggtgggaggatggcttgagcccaggagtttgagaccagcctgggcaacatagtaaaacctcatctctacaaaataaataaattttaaaagaaatccatgctctgctactaataaccatagtatttatcctttatgtgcctcagtttctttctttcttccttccttccttcctttctttcttcctttccttctttccttctttctctctttcttcctttttttttttttcagggtctcgctctgtcacccaggctggagtgcagtggagtgatcttggctcaatgcaacctctgcctcccgggttcaagcaattcttgtgcctcagcctcccaagtagctggcattacaggtgtatgccaccatagcccagctaatttttttgtatttttagtttagatggggtttctctatggtggccaggctgatctcaaactcctggccctaagtgatccatccaccttggcctcccaaagtgctgggattacagacgtgagccaccgtgcctggcctcagtttctttgtctggaaaatggagcattaatgcatgttacagtatagcacaatgcctagcatgtggtcttcacataagtttgttttttttttctttcttgagatggagtctcactctgtcacccaggctggagtgcagtggtgcgatcttgcctcactgcaatctgtgcctcctgggttcaaccaattctcctgcctcagactcccaagtagctaggattacaagcgccccgccaccacgcctggctaatttttatatttttagtagagacaggtttccccatgttggccaggctggtctcgaactgctgacctcaagtgatctgcccgccttggcctcccaaagtgctgggattacaggcatgagccactgtgcccagctttttttttttttttttttttttgagacagcatctctatcatccaggctgggatgcagtggtatcatctctgctctctgcaacctctgcttcccaggctcaagcgatgctccaacaggcatgagccacggcgcctggccatagttcttgttattataatctttaccaatgtgttcgtttcccccgcccccgctccctagcttgtttgtgtcccgtcagtccctgcagtagtcatcccccaaggcctagactctccctgggctgcatagccctcaacaagcccaatttcatgctcccaaaagccctggtgggaaggcctaggggccacgtggagggggaaacaggtagcaacttcatctgaaagtgtcaccaaatgatcagcctgaggccagatgcagtggtcatgcctataaacccagcattttgagagggcgagactttgggaagcagattgcttgagtctaggagttcaagaccagcctgggcaacatggtgaaaccccatttctgcttaaaaaaaaaaattagctgggtgtggtggtgtgcgcctgtggttccagctactcaggaggctgaggtgggaggatcgcttgagcctgggaggctgaggctgcagtgaaccatgatcgccccactgcactgcagtctgggtgacagagcaagaccctgtatcaacacacacacacacacacacacacacacacaaacaaacaaacaaaaaacaatgattagcctgcctaagagggagtcttgggcgggtcacttcacctccaatggagcgtctgggcatgtggctgtgatgtaaggctggcagctacccctgtgtctgggttgcaaccttgggtcccatggggatgttgctggagtggcctctggcctaactttgggccaccctgagcagtcagtggcaagccagggaggggtgactctccatggctcagggatctgattctggggcatcactggccctgactctcccctatccccaccagctcccaggcagcagttctatagccctgtcccctcccctctgtcctccctcagcccaggggacatcgggtcttgaaacagaaacagcagggccccagggagtgtcctcttcccatccaggcctctgggctcctgctgacgtgagctgagtcccttggggctggtggatgtgccaggatgtgctagctgggcacctgcttgggaacagagtctcaccatcctaaactgcagcttaaatcctaggccggggagttggaggtgtgtagctatgttcctctcgccttctctggagctgaaaaaaaatccaccttaggagacaggacacagttctcagacaatgaagccaccaaccccttgtctccttatgccatgggaatgttaacaggacttatatgttgccaggcgcagtagctcacacctgtaatcccagcactttgggaggccgaggcaggtggatcacctgagatcgggagttcaagaccagcctgaccaacatggagaaaccccgtctctactaaaaatacaaaattagccgggcatggtgatacatgcctgtaatcccagctactcgggaggctgaggcaagagaatctcttgaacctgagaggcggaggttgcagtgagccgagatggcgccactgcactacagcctaggcaataagagcgaaactccgtctcaaaaaaacaacaaaaaccaggacctatatgttaacttatagagtgggttggagccctctgtcggttaatgtgtataaagcactttcataatgccaggcacacagcaagcattcaataaatgtcttgttattattactgtatgcctgaaaggatctaacctggcacccaggacacagcaggtgctcaacaaatggacactattggctgggtgcagtggctcacgcctgtaatcccagcacactgggaggctgaggcgggtggatcacctgaggtcaggagttcgagactggcctggccaacatggtgaaacccgtctctactaaaaatacaaaaattagccaggtgtagtggcgcacacctgtagtcccagctactcgagagactgagtcaggagaattgcttgagcccggcagcagaggttgcagtgagctgagatcacatcactacactccagcctgggtgacagagtgagactccatctcaaaaataaataaataaataaataaatggacattatcatcaaaggtccaagctgatgatctatgattatctcaccttaagaaccttaagagtggctttttttgtttgtttgttttttgagactatcccctaggctgcagtgcagtggctcgatcttggctcactgcaatctccacctcccaggatcaagtgattctcctgcctcagcctcctgagtagctgagatcacaggcgcacaccagcacgccaagctaatttttgtatttttagtagagacggggtttcaccatgttggtcaggctggtctcgaactcctgatctcatgatctgcccgccttggcctcccaaagtgttgggattacaggcgtaagccaccgtgcccggcctttttcttttttttttgagatagggtctcactgtatcacccagtctggagtgcagtggcatgatcacagctcactgcagcctccaaatcctggtctcaagcaatcatcttgcatcagcctcttgagtagctgggactatacacatgcaccaccatgctcagctaacttaaattttttgtagagacagggtcttgctatgttgcccaggctggtctcaaactcctggacttaagtgatcctcccacctcagcttctcaaagtgctgtgattataggaatgagccattctgcttggcccattttatccattttcgagtgtatagttcagtggcattaagtacattcacattgttgtgcaaccatcaccaccatccatctccaggactgtttttttttttttttgagacagggtctcactctatcacccaggctggagtgcagtggcatcatcactgctcactgcagtctatacctccagggctcaggtgatcctcccacctcagcctcctgagtagctgggaccacaggcgcacaccatcatcatgccttgctaatttttttcattttttgtagagatagggccttgccatgtttcccaggctggtgttgaactcctgggctcaagcaatcctcccgcgtgggcctcccaaagtgctgggattacagatgtgagccacttcacccagcctccaagactttttttttttttttgagacggagtctcgctctgtcgccaggctggagtgcagtggcgcaatctcggctcactgcaaccttcgcctcccgggttcaagcgattctcgtgcctcagcctcctgagtagcttggattacaggcacgcaccaccacacccagctaatttttgtatttttattagagacggggtttcatcatgttggccgggatggtctcgctctcctgaccttgtgatccgcccgcctccgcctgccaaagtgctgggattacaggcgtgagccaccacacctggccaggactttttaatgttctcagactgaaactttaagcacaaacacaccatttccctatctcccccagccgctggcacccactcttctactttctgtctctgagtttgagtactccagggacctcatataagtggaatttcctgtgcactatttgtctttttctgactggcttattttactgagcataatgtttttttgtttgtttgtttgtttttgagacagagtttcactcttattgcccaagctggaatgcaatgtcccaatctcggctcactgcaacctccacctcccaggttcaagtgattctcctgcctcagcctccgagtagctgggattacaggcatgtgccaccacgcccggctaattttgtatttttagtagagacagggtttctccatgttggtcaggctggtctcgaactcccaacctcaggtgatccgcccacctcatcctaccaaagtgctgggtcactgagcataatgttttcagggttcatccatgttgtagcctgtgtcagaattcctttcctttttaaggctgaattctattccattcaatggatataacacattttgttgatccattcatctgttgatggacacgtcagtcacttctaccttttggccatcgtgaattacgctgctgtgaacatgggtgtacatgtatctgtttgagatccccactttcaattcttttggggatagacctaggagtgggattgcgcggttgtgtggtgattctacgtgtttgtttgttttgagggttttttgtttgtttgtttggttggtttctgacagagtctcattctgtcggccaggctggagtacagtggtgtgatctcggttcactgcaacctccgtctcccgggttcaagcaattatctggctgcagcctcccgagtagctgggactacaggtgcctgccaccacgcccacctgatttttgtatttttagtagagattgggtttcaccgtgttggccaggctggtctcgaactctggacctcaggtaatctgcccgcctcggcctcccaaaatgctgggattacaggcgtgagccaccgcacctggcctacaaacatttttgattggggttacagtggttctctcaacagcaggtaggaatggattgtttgtgagtggggaggaatcggagcagcagagagacctggttggaatggagagtgcagcaggtgagagaggaggtgttgtgacctcagggatgcgaagagtccaggccttcaataaggtctgtctctggaactcaaatctgaggcccaggaggcgggtcagaggctgagagacggggtggatggaggtaggagtgcctcctggctccacagtcccttctcttggagtgaagagaccagctgtctggaggggagagcaactgggaaacaggacacgggtaaaggccagttacaagtggcatcctggagagaaggtggctcaggacacagctgtccccaaaataccctccttggcattgcatgcaggggatggaggaaccctaagatcttcaaaagtaaaaggcccttcaggaaccatcctaataggcgtgacatggtatctccttttttttttttttttttttgagacggagtcttgctttgtcacccaggctggagtgcagtggcgtgatcttggttcactgcagcctctgccacccgggttcaagcaattctcctgcctcagcctcccaagtacctgggattataggcacccaccaccacacctagctaatttttgtatttctagtagagacagggtttcggtatgttggccaggctggtctcaaactcctgacctcaagtgattcacccaccttgcctcccaaagcgctgggattacaggcatgagccacctcaccagacctgtatctctttcttttgatttgcgtttccctgatgagtgatgttaaggattttttttcatatgtttattggctgttttaatatcttttctgcagatatgcctattcaagtcatttgcctattaagtcaaattatttacaatttattatttattattttgagacagggtctcactctgttgcccaggctggtgtgcagtggcacgatgtcagctcactgcaatctctgcctcccgggtttaagtgattctcccacctcagtctctctagtagctgggattacaggtgagagccgccatgcctggctaattattttatttatttatgtattttttgagacagagtctcgctctgtcatccaggctgaagtgcaatgtcgcgatctcagctcactgcaacctccaccttccgggttcaagcagttctcgtgttttagcctccccagtagctgggattacaggcacatggcaccacgcccggctaatttttgtatgtttagtagagacagggttttcactgtgttagccaggatgggctcgatctcctgacctcgtgatccacccacctcggcctcccaaagtgctgggattacaggcgtgagccaccacgcccagccaattttttttttttttttttggttgagacggggtttcaccatgctgccctggctggtttcaaactcctagactcaagtgatccgcccacctcggcctcccaaagtgctgggattactggtctgagccaccaggcctggcctatttatttttgaaacaaagtctccctctgtcgtccaggctggagtgcagtggtgcgatcacagctcactcactacagcctcaaacatcccaggctcaagtgatcctccagtcttagcctcccagtagctgggactgcaggcacacactgccatgcctggctaattaaacaagttttgtttttttgtgttttttgtttctttgtttctttgtttttgagtagctgggactataggtgcacaccaccatgcccggctaatttttgtatttttagtagagacggtttcgccatgttgtctgggctggtctcgaactcctgacctcaagtgatctgcccgcctaggcctcccagagtgctgggattacaggcgtgagccaccgtgcccagccctttttttttttaagagatggggtctcactatattgcccaggctggccacaagctcctggtctcaagccatccttccacctcagcctctgttgatacacaaaagtctttcattttgttgaagtccacttgtttgttattgttgttgcctgtgctttggtgtcaaattcaagaaatcattgccagatctaatgtcatgaagctgctaagagttttatagttttggctcttatgtttaggtatttggtcattttgagttatttttttttttttttttttttttgagatggagtctcgctctgtcatccaggctggagtgcagtagtgtgatctcggctcactgcaacctccgcctcctgggttcaagggattcttctgcctcagcctccggaatagctgggattacaggcacccaccactacgcccggctaatttttgaatttttagtagagacggggtttcaccatgttggccaggctggtctcgaactcccgacctcaggtgatctgcccgcttcaggcctcccaaagtgctgggattacaggcatgagccaccacgccctgccttgagttaatttctgtatgtggtccacctcttcagttttcccagcaccatcgttttgaaaagacagttctttccccattgagtagtctctggggttagactagtaggtagatttcaggctatgctctgagtgggtgcaagtggagagggagagaggataggaaccccccgcttcccctttctaggtcagcctatagagagtcaccataagactttactggaatggtctctctactaagaaataagtttgaaatctcctaggcctgccaggcacctataatcccagcactttgggaggctgaggtgggcagatcacttgaggccaggtgtttgaaaccagcctggccaacgtggtgaaaccctgactgtactaaaaattcaaaaattagccagatgtgctggtgcatgcctgtaatcccagctatccgggaggctgaggcaggagaattgcttgaacccgggaggcagaggttgcagtgaaccgagatcgcgccactgcactccagactgggcgacagagtgaaatcctgtctcaaaaacaaaacaaagcaaaacaaaaatgtataagaagacacgctttaggcatagcgtttcatgtctgtaatcccagcactgtgggaggccaaagcgggaggatctcttgagcccaggagttacagactatcctgggcaacatattactattactattattaccttattattataattacttattacatattaccttattactattattacatattaccttattactattattacatattaccatattactattatcacatactactaatatatgtaatattactaatattacatatataatatcagtaatattatatatagtaatattatatacatgcatgtaatattagtaatagtgcatatacatgtatgcaatattagcaatattgcatatgcatatataatactagcaatattgcatatgcatgtgtatgtaatattagtaatattacatattacatattaccaatattacatattacctattactacaaaaaattcaaaaattatctgggtgtggtggcacgtgcctatagtcccagccactcccgaggcttaggtggggggatcgctagagtccaggaggctgcagtgagctatgatggttccactgcactccagcctgggcaacagagtgagaccccatcactaaatgataagctgcaaacttggagaaaaatacatgataagggatttgtatccagaatatataatgggccagccatggtggctcacgcctgtaatcccagtgttttgggagcccaaggcaggtggatcacttgaggccaaggtgagggcattgcttgagcccaggtgttccagaccaacctggacaacatggcgagaccccatctctacaaaaaatacaaaatttatctgggggtggtggcatgtgcctgtagacccagctgcttgggaggctgaggtgggaggatttcttaagccagggaggtggaggttgcattgagctgagattgtgccattgcacttcagtctgggtaagagagtgagaccctgtctcaaaaaaaaaaaaaaaaaaaattagctgagcttgctggcgtacacctgtagtcccacctacttgggaggtggaggtggaggatagcttgagcccaggaagttgaggctgcagtgagctgggattgccctacaggactccagcctgggcgatagagcgagatttcatctcaaaaaaacaccaggccaggcgcagtggctcatgcctgtaatcccagcactttgggaggccgaggtgggtggattacttgaggtctggagttcgaaaccagcctggccaacatggtaaaatcccatctctactaaaaatacaaaaattagccaggtgtggtggcaggtgcctgtaatcccagctactcgggaggctgaggcaggagaattgattgagcccaggaggcagaggttgcaatgagccaagatcgcatcactggactccagtctaggtgacagagcaagactgtctcaaaaaaaaaaaaaaaagataaatatagattatgtcaagtaagtagtgggattttagtttgtgtgtgtgtgttttaaggaagagaaatagtattgggctgggcacggtggctcacgcctgtaatcacagcactttgggaggtagaggtgggcagatcacctgaggctgggagtttgagaccagcctgaccaacatggagaaaccccatctctactaaaaatacaaaatgggctgggcatggtggcccacacctgtaatcccagcactttgggagcctgaggcaggtggatcacctgaggttggaagttccagaccagcctgactgtgtctactgaaaatacaaaatttgccaggcgtggtggtgcatgcctgtaatcccagctactcgggagactaaggcaggaaaatcgcttgaacccaggaggcggaggttgcggtgagctgagatcgcgccattgcattccagcctgggcaacaagagtgaaactccatctcaaaaaaaaaaaaaaagtattatggttgaaattttagctgggttggtcaggggaggcttctttgtggcagtgacatttgagcagaggcctgaaggagggaaagaggagccgctgcaaatctgggctggagaaacagcctgtgcaaaggccctgaggcaggactgtgtctgagattttttttttttttttttgagatggagtcttgctctgttgcccagactggagcgcagtggcaagatcttggccctcactgcaacctccgtttcctgggttcaagtgattctcctgcctcagcctcccaagtagctgggattacaggcatccaccaccacgcctggctaatttttgtatttttattagagatggggttttgccatgttggccaggctggtagagaactcctgaccttcagtgatctgcccaccttggcctcccaaagtgctgggattacaggcatgagccacctcaccccggcctgtgtctgagatttttagggaacagtgaggaggccattgtggctggagcagaatgagtgaggggggaagggaaagtcgtgggacaggacctgtgagctgcagtgaggactttggattttgcccagagtaaggtgggatccatcgaaggttctgagcagagggaggacttgacctcattcaggtgtttccaagctcgccctggtggccactgaagaaagactgggggttgaaaacaggaggtgggtactagggcagaggtgaatgcaaccagtcctggctgagggaagctgaccaaggagtgggtgagaagtagacagattctggatagattttggcaccaaggctgatttgaggtacgaaggaaagagtgaatgatcccataaattttggccttggggtgtccccagcacagcagtggggatggatgcacaccggtgctcaagttccatctttgcaattctgtgtctcccgtctcttttagggcatctgtctttctttaacatcctccacttggttgggcgcagtggctcaggcctgtaatcccagcactttgggaggccaaagagggaggatcacatgaggccaggtgtttgagaccagcctggccaacatggtggaaccccatctctactaaaaatacaaaaattagccaggtgcggtggtgcatgtctgtaatcccagctacgcaggaggctgaggcagaaaaatcacttgaatccgggaggtggaggttgcagtgagccaagatcacaccactgcactactccagcctgggccacagagcgagaccatacctcaaaaaaaaaaaaaaaaaattctccacctgaatgtctgccaggaattcccttaggctcctcatcccacccccacctttttttttttgagacattgtcttgctctgtcacccaggctggagtgcagtggcacgatcttggctcactgcaacctccgcttcctgggttcaagtgattctcatgcctcagcctcccgaatagctgggattacagacacctgccaccatgcccggctaatttttgtatttttagtggagacagggtttcatcatgttggccaggctggtctcgaactcctgacctcaagtgattcacccccacttggcctcccaaagtgctgggattacaggcattacaggcgtgagccaccgcacccggcctcctcattcctcttgacctccctaatagcgtttcagcctcctgacccctcttctcgcccatcccctgcagcttcgaggcagagaatgggccgacaccatctcctggccgcagccccctggactcgcaggcgagcccaggactcgtgctgcacgccggggcggccaccagccagcgccgggagtccttcctgtaccgctcagacagcgactatgacatgtcacccaagaccatgtcccggaactcatcggtcaccagcgaggcgtgagcatccttctccccacatgccagttcccccaggcctggtcctgctggaagctgcccttcccagcagggagtcggggggcacccacccctatcctcctcagcactcccaacctgtcctccccagtgaagggtaagcagcaccctgcccctcctataaagggctcagttcctttttttttttttttctttttttcttttttgagacggagtctcgctctgtcgtccaggctggagtgtagaggtgccatctcagctcactgcaacctccgcctcctgggttcaagcaattctcctgcctcagcctcccgagtagctgggactacaggcaccagccatcatgcctggctaattgtgtatttttagtagagacagggtttcaccatgttggccaggctggtctcaaactcctgacctcaggtgatccgcctgccttggcctcccagagtgctgggattacaggcgtgagccaccgcgcctggcctcagttccttttttttttgagacggagtgtctctctgttgtgttgcccaggctggagtgcagtggtgcgatcgcggctcactgcaagctcctcctcccaggttcacgccattctcctacctcagcttcccgagtagttgggactacaggcacccgccaccatgcctggctaatttttttgcattttttagtggagacggggtttcaccgtgttagccaggatggtctcgatctcctgacctcatgatctgcccacctcagcctcccagattgctgggattacaggcatgagccaccgcgcctggcctcagttcctttttttctcttttttttttttttttttttttttttgagacagaatctcacactgtcgcccaggctggagtgcaatggtgcaatctcggctcactgcaagctccacctcccgggttcatgccattctcctgcctcagcctcctgagtagctgggactacaggtgcctgccaccacacccggctaattttttctatttttagtagagacggggtttcaccttgttagccaggatggtctcgatctcctgacctcatgatccgcctacctcggcctcccaaagtgctgggattacaggtgtgagccaccgcgcccggccctcagttccttttttaaaaaatataatagtgatcgggtctcactatgttgcctagactggtctcaaactcctgggctcaagcgatcctcccacctcagcctcccaaagtgctgggattgcaggcatgagccaccctgcccgccctcagttactttatagcatgtccagccagaaaggtgtgagtgcccacccactgtatcctcccacagtgtgtacatctcacctgacccaccctctgcccttcctccaggttttcctaagctaacctcccttatcgtgacacttgttgaggtgtgagttccccctgaacctgctcagcctcttcctctctcactgggttcctccaggcctttccaccagccattgctgtacacacctcaacccacttggtccccttcctgttcactgctcccctcatcaagccccgcccttgcaacatattcacctcgggtcaggcttggaagctcacactcataatcctagcacatttggaggctgaggcagaaggattgcttgagctcaggattctgagaccagcctggccaacatagcaagacttcatctcttttttatctctctcttttttttttttttgagatggaatcttgctctgtcaccaggctggagtgcagtggcgcgatcttggctcactgcaacctctgcctcccgggttcaagggattctcctgcctcagcctcccaagtagctgagactacaggcgtgcgtcaccacacccagctaatttttgtatttttagtagagacaaggtttcaccatgctggccaggataagatgtcatctctttaaaagaaaaaataaataaataaaaaggtcaggcacggtggctcacgcctataatcccagcactttgagaggccaaagtgggtagattgttccaggccaggagtttgagaccatcctggccaacatgatgaaacccagtctctactaaaaatacaaaaattagtggggcgagaggcacatgcctgtaatcccagcttcttgggaggctgagacaggagaatcgcttgaacctgggaggcggaggttgcagtgagctgagatcatgccaccacactccagcctgggtgacagagtgagactctgtctaaaaaaaaaaaaaacacccaaccatattcacctctcccctctccccttttccactttgtctcttctccccggacctacctgagccacactccttgactgccatttcttccacgatcagccctggacacatatccacccttatgcagtacaagtgttctttccctaggtcccacagagtcccctccctccctctcagcctccctgggtccagcctcacagggcatctaccccagacagttgcttctctgcggacccctgacctgcctctgtcctcaatcacaggcacgctgaagacctcatcgtaacaccatttgctcaggtgagacctcttcccaaatggttaaggagagaaggggctccaatgctccgccacacttggggacagggcccagccccgctgcctctctaggggaaccccactcctcactgccgctccccatcccaggtgctggccagcctccggagcgtccgtagcaacttctcactcctgaccaatgtgcccgttcccagtaacaagtaagtgaaggctgggctgcaacagctgtgatcataaggtgaagcatatgcgggttctgctctcagccctgctgtgtgacctctggcaggcaggtgacctctctgaacctctgttcagacaacagctcccagaaagccagagagccattgcaggtcaagtgcctaagacacagaggtgttttttgtttgtttgtttgttttttgttttttgtttgtttgtttgttttgagatcaagtctcactctgtcacacaggctggagtgcagtagtgcgatcttggctcactgcaacctctgcctcccgggttcaagcaattctcctgcctcagcctcccgggtagctgggattacaggcatgcaccaccacaccgggctaatttttgtatttttagtagagatggggtttcaccatgttggccaggctggtctcaaactcctgacctttggtgatccacccgcctcagcctcccaaagtgctaggattacaggtgtgagcctctgcgcccggcccagaggtttttataaataaagatttaggggtctggatgcatggtggtgaggccacagccacagtccccaggcccaccctgggtcttgacaccaagttgctgggcaaatggcattccatggtgcttctgttgcccttctgcaaagtgatgatcacagccaagcgtgctggctcatgcctgtaatccagcactttgggaggccaaggcaggaggtcacttgaattcaggagttcaggaccagcccaggggaaacaaaatgagaccctgtctctaaaaaaaaaaaaaattagcccagcatggtggcatgtgtctgtggttcccacctacacagaaggctaaggcaggaggatagttttgagcccaggaggttgaggctgcagtgagctgtgttcccaccactgcactccagcctgggtgacagagcaagaccctggttcaaaaaataaatagataaataaagtgaggattacaataatgcctcccttagataactgctgtgaggagaggagatgatgtctagaaagtgctagaatattgccctgcgtacataggagtggatcttaattgtttcagtgcaagagatgtggctgagagctgccagtccttctgggggtgggggatagagacatccttaggggcttggaggatttgtggagagttaggcaagagagcagagatcttggaagcccaggacctgaccttaaggcggatcagccatgtggtcttgaagaagctgtttcacctccttgagcctcagtttccacatctataaaatggatttttctgggactcattgaggctgcaggcagagtacatggcagcgtccttaggacacggtgagttttcagacaaatgaaaattggcactgttcatgaaagcgggaggcagggacctggtggggggacccaggctgacattgcagccccatttttttttttctgcaggcggtccccgctgggcggccccacccctgtctgcaaggccacgctgtcaggtagctaagcccagaggggtgggaaggggccccccttgctgccccagtgggggtccctcagccccttccccacccagcagtccactcacctggcgaaccccgtcacggcggtctggagcctctgggcttctgcctacagaccttctcagtcactaccctggctgccccttccttagaagaaacgtgtcagcagttggcccgggagactctggaggagctggactggtgtctggagcagctggagaccatgcagacctatcgctctgtcagcgagatggcctcgcacaaggtgtgcaggtggtgggcagaacccctgggcggggcaggcgggggcggggccagtgggtagagccaaccgctggatgggaccagtgggcgcggcctgcggatggagccagccattaggttgttcctgtgggcggagatagctactgggtgtggctgattagggcagggccaatccctgggcgggggctggtggagctgggccctatggatggagccaaccactaggttaggcctgtagccgaggccaactattgggcgtggctcatgagggtggggccaatctctgggtagggtctatggtatggggtcagtccctgggtggggccaacccctgggcggcagcttcaaggcttgaagctcctgtagattatgactttccccagggctggaggagcctggtgtgtgttgtggggtggggtgtgtctgtctggttgtacatgtgtcaataggtgaccgtttccgttggggggttttatgcttttatggtctgcgggggtgtatctgcggctataggtctgcgtagccgctggtttattggctacgcatttgcagcgctggggtgttgggaatagattctgaagagtggcacgccagtgtgtacttgtgtaggtgtataggtttgcacgggtaattatgcagggttataggtgtgtggggctgtgccagaggggtgcgcatgtctgcaggggagagttggaccagatgggaaactgaatgtgtagctctatgtgtttgtgaatgtgtgtgtttgcagggccgtaggggtgactgcaatgctcccatgtacagttgtgcagacggtgcactgcacaactccaggggacaccattcaggaagcaggcagtatgtgtgaatgatgcttcctggagttggagagagtggtaacagcccttgtgggcgggtgcctatcaagaaatgatctgtaggtgggagtgtctttgttggggggtgcttacagcagtgggtggaggcttgtataggaacatagcagtctgagggcgattgtgtccctgagggtggatcaagcatctgaaatgtagctgtgtctttggatatgggtctgaggatgtttctgcaatggtgtgtgtgtgtgtgtgtgtgtgtgtgtgtgtgtgtgtgtgtatttttgcatctgtgagtatatttccttatggatttgtcgggatatgtttgtgtccaagggcagtggatatttgcaatggttggaaagtgtgtctgtgggtgtgtttagtgtgtgtctgtaagtgtggctggctggggaggccaaggcgggcggatcacctgaggtcgggagttcgagcagcctgaccagcatggagaaaccccgtctctactaaacatacaaaattagtcgggtgtgctggagggtgcctgtaatcccaactactctggaggctgaggcgggagaattgcttgaacctggaaggcggaggttgtggtgagccgagatcgtgccattgcactccagcctgggcgacaagagtgaaaactccgtctcaaaaaaaaaaaaagaaatgtggctggtatctcggtgtctgtctataggtgtgggtctggatgtgggtctggatgtgggtctgtgcccttggatggggcgtgtctgaaggcatttgctatatgctcagctgtggacctataagtgtgttggacatcagagttgtgactgtctccgggtgtgtgtgtgtgtgtgtgtgctgtaagtgtacaacagaaagcatttgagtatctgtgtatattcaagtgtcaagtgcctggatgtgtgtgggtgtccctggaaggtgtgtctcagggtgtttgtacatctgtgagtgtaaagtggatgtgtgtttctgtctctgggtgtgtccatggaggggatgggtcctgatggggacagcccacctaggttctggctgaggcccatgggctctgatgcccctttaatacccccccacccccagcaccacctgacatcccatgcagcctgccagtgctgcagtgagcacacacgcacacacacgggtgcacacacagagctccgcagcctcctcctgggacccttgccctgcccccctcccatgggcacggaccccccaccgcctccacccactgccgcgggggggcccgttggggcccagggctggcgggccatgtaaccagggctgctgctgggagcgcggaggggaagggagcccccagccctgctgggccggcccaggcccctccgcggctcccccttccactacccacctgcccggcaccccctccccagtggttgttaaccccgggactccccaagcccagcctctgtgtgcagcagccccaggcgggctaagtctccaagatgcccttggtggatttcttctgcgagacctgctctaagccttggctggtgggctggtgggaccaggtaggagagtgcagggtagggggtgggcgggcatcctggtgagctgggcccccggtgtgggcttgtgtgtgcagctgtgcacgtgtgtggcctggagatgaagccttgtgactgtctctgtgtgtggcccagggctgggcgtggatggcgggcagctgggggtgtgtgactctccctgggggtggactgcgggtccctcactgggtgtgactgtgtcagtgcctggatgtgtgtgtgtgtgtctgcgatggtgtgtgtctgcctgagtataggcttgtttgcctgggtcactgtgtggccctgtctgagatcatctggctctgaccatggtgttgtgtgttgggttgtgtgtctgagcccagagctgcctgatattttggggacatgtgaccccaaatgtcagtgaccgccttattttgcatgccctttgatctgtgtgtctgggctgtgtgacgctgtgtaggactgagagcctgtgattgtgtgtgtggttgtgtgagattttgtgggtccatcttgtgtggatgtgtgtgtctctgtacccagggtctctgggtggcaccgggaggagggagcaccccgtccaagcctgggccatgcaggctcacccctcctgccaagtgtccctcctgcttccctggacagagtctgctcctgcttttggggtgctgtggcagagcttgggggtggggagccaatgccctttctcctctgtgtacaatgtcacagcagaggcctgtgcagagtggcatggggggaccaggaggggcctccaagcccggttttgggtatactctgttcatctgtgcatctgtccacccttctggggttgggggagagtgggctatgatgagaacccccctccccctcccctgggtgatcaaactgggatttcctcagctcaccattctcccctaccccggccaaacctttttgtcccccagagcttggctaccacgttccctttttccaaactgagctggaggccaggagccaggacccccaggattggggtccatgtctgggaacacttgggtcaggggcagctctaggaaggcaagggttaaggggcctccggcttgccccccttttccccagctcagcagctggttggagggggagttgctaaggagactcccatcgccatggcgacgggattctcctgcttccctattggctccctgttaggcaggagcccctcccttccacaggtgcccctctagctcctccttgggggagatgaggagggaagcccctctttcctcaggcagggagggttatgctgaccatgactccccaaacctggggacctccatccagagctgggaggacaggaaaggctgaccccaaccccccagcagtcttataggggctctgttggctgagcagaaaaataggagggactcatggggtcttcaggcgttcttgggaaggactgacaccctcctcaccactgtgcttcccccatcatttcttccttgttgactcctttaccttagttcaaaaggatgttgaaccgtgagctcacacacctgtcagaaatgagcaggtccggaaaccaggtctcagagtacatttccacaacattcctgggtgagtgaggggaagcacgtgggattggaggggggacatttggggtagagagggggctgcccctgaccgtgggtcctgttgctcacatcttcccagggactctgactctcaactccccaaaggtcacagtcaccctatccaggaaccctcatgttcctgatgcctccaaactctgtgggacccccagcttctatagagcccaacatctgaaatcatctgtgagcttaaaacccttctaaactttaaaaagcctccaagcgccgggcgcggtggctcacgcctgtaatcccaacactttgggaggctgaggcaggcggatcacttgacatcagcagtttgagacctgcctggccaacatggtgaaaccccatctctactaaaaatacaaaaaattagccaggcatggtggtgggtgcctgtaatcccagcaactcaggaggctcaggcaggagaatcgcttgaacccagggggtggaggttgcagtgagccgagatcgctccattgcactccagcctaggcaacaagagtgaaactcttgtctcaaaaaaaaaaaaaaaaatattagccgggcatggtggtgtgtgcttgtaatctcagctacttgggaggctgaggcaagagaatctcttgaactcaggagacagaggttgcagtgagccaagatcacaccactgcgttccagcctgggcaatagagtgagactccgtctcaaaacaaacaaacaaacaaacacctctttgttttagcactcacttgaacccgggaggcagaggttgcagtgagctgagatcacgccactgctgcactccagcctgggcaacagagtgagactctgtctcaaaaaataaacaaaaaaaaaaagcctccaagctgaaaagcctcctgaactgagtagaaccccaaattcaatagaatttccaaacttggattgactcccttccaaactcagtagacacacccaaactcaagagagatgcccaaactcagtagagttctcaaacttaagggaagttctgtgcttccgagtccacaaaaggccccccaactttagcaacctccaaactgaaaaacccccaaattcaataggatctccaaacttggtatgacccccccccaattcagtagactcccaaaatgttagaaccctaatctctagaagattatcaagcttaagaacctgtaagaggcaggaagaggcagctcttgcctataatcccaggactttgggaggctgagaaaagaggatcgcttgagcccaggagttcaagaccagcctgggcaacatagtgagaatctgtctctacaaaaaaaattaaaaactaggccgggcgcagtggctcacgcctgtaatcccagcattttggaaggccgaggtgggcagatcatgaggtcaggagttcaagaccagcctgaccaacatggtgaaacgccatctctactaaaaatacaaaaattagctgcgcgtgttggcacacacctgtaatctcagctactcaggaggctgaggcaggagaattgcttcaacctgggagatggaggttgcagtgagctgagatagcgtcactgcactccagcctgggtgacagagtgagactccatctcaaaaaaaaaataaataaataaataaataaatagaataaaaaactagtcgggcatggtggcgtgtgcctgtggtcccagctacctgggaggctgaggcaggaggatcacttgagcccaggagttcgaggctgcagtgagacatgattgcgccactgcactccagcttgtctcaaaaaaactaacacctgtaagattcctaattcaatggaaccccaaatgcaccagaataccccgatttcactggaacccttaagttcatgggtacctcaaaaccctcaagctagagatattcccccaaactcaggataatttaatcctcgcagtttatcactacactccaaaggcccccaaattcgggaaccgcccagacaagctcaagaaaagtgttggggctgggtgcggtggctcacgcctgtaatcccagcactttgggaggccgaggcaggcggatcacttgaggtcaggagttcaagaccagcctggccaacatgatgaaactccatctctactaaaaatgtaaaaattagccgggcgcggtggcgggtgcctgtaatctcagctactcgggaggctgaggtaggaaaatcgcttgaacccgggaggtggaggctacagtgagccagagatcgtgccactgcactccagcctgggcgacagagcgagactctgtctcaagaaaaaaagtgttcggtgtttccagtactcccaccagtgagggtgtgtctctgagttctgaggatccacccaatgggagcataacatgtaaatgacccgtattaggccttttcattgactagctagctccaggtcacaatgggtgaccttggctcagctctggaagcccctgaaagctcaggaaaagggttcctggggctgtcccccaggcaggctggtgccaaggtgggcgggggggggggggggcagggacatggagccagagaccacccttccctctctcttcccagtgatgccaccccccacaccagcactcttggcccccatgctgggatcttccccacccagaaaggttccctgggtgttcggggtaggcagcggctctccctggcatccccacctcgctttctgacttcccacaccactctccatccatatctgatgatcagaccggggccatcccagagccctgggcccccactccagcccaccacctcctggaagatttcccacatcccctctggtttcctgactctgagtagccagcggcatcacagctgaaagggttctgccgtttcgggtgagccttccccgtacgtggtagtgggctgaagaataagggagcctccaggggtggaagggttgttcacacttgttcctgctccccatcttctgcagacaaacagaatgaagtggagatcccatcacccacgatgaaggaacgagaaaaacagcaagcgccgcgaccaagaccctcccagccgcccccgccccctgtaccacacttacagcccatgtcccaaatcacagggttgaaaaagttgatgcatagtaacagcctgaacaactctaacattccccgatttggggtgaagaccgatcaagaagagctcctggcccaagtgggtgggggctcagtaggggcagggctggagggggtggtctcctgggaccctgagaaggactgggcattgggttatgtcttaggccaggtttcccagaagcagagcttgagatgagggtttgagcccatcttgaggcaagcatgctggctctttgtacctctgtatcattcattgcttgggggccgtccccagggctggacgtatcacctcttgcatgtagctcctgttgggactagtcttctggaaatgcaggcagctgtgagccttagcaggcaacactcccagctgcagagggattggtgtacacagcagtgacgctaatccagactgtgcccccatagtgtccccaacagtccagaccggtgtttcactcctagctcttccaggggacagcggcagtggaagtgatccatctttggtggctcactcagctgaggcttattgtaaccctctttgagccacctcctccagtgaatcttccattcagtcacctggcctttagttatttatttttatttatttatttattttgagatggagactcgctctgttgcccaggttggagtgcagtagtgtgatctcggctcaaggcaacctccacctcctgggttcaagcaatactcctgcctcaccctcctgactagccgggactaaaggcctgtgccagcacacctggctaatttttgtatttttagtagaaatggggtttcaccatgttgaccaggctggtctcgaactcctggcctcaagtgatccacccgccttagcctcacaaagtgctgggattgcaggcgtgagccactgcacctggccaactggtgtttattaagcagctactatgtgctggcccttttctgaattttggagagacatggaaaataagcccttcttcctttctcccctggggctcgtgaacagcttagctaagaggctgagctgtgctggggccagtcgtgctgggttcctatcctagctttgccacttatgagctgcatgatcttggagaagtcacatcgcctctctgagccttggtgccttcacctgccaaacgagatcaagtgcttagagcaatacttggcagatcataagtactcaaaagacagtggctgtgattgctttcgctattttgcagcccagtaggacgagggcagtacattctgtgctgttgaacctgtcacccactgggtgagcaataatggtgcttccttcagaccaaggcttcaaactcctaggaaatgttctccagggccctgagccttacaggcttctgacctctggcctccgtctccaccaggaactggagaacctgaacaagtggggcctgaacatcttttgcgtgtcggattacgctggaggccgctcactcacctgcatcatgtacatgatattccaggtgatggggacagctgggagtgggcccgggtgaggggctcatagcggggcgctggaggccggtggaggtcaccaccctgcccctgcctgctctcaggagcgggacctgctgaagaaattccgcatccctgtggacacgatggtgacatacatgctgacgctggaggatcactaccacgctgacgtggcctaccataacagcctgcacgcagctgacgtgctgcagtccacccacgtactgctggccacgcctgcactagatgtgagtgactgccctgtgagtgaccgtccccatctctctttgtgactgcctcttcagcctcctgtgtgtctctctgaccctgtgtctctgacctccatctctctttgacgccatttctctctcttttttttttctttttgagacggagtcttgctctgccacccaggctagagtgcagtggcacgatctcagctcactgcaacctctgcctcccgggttcaagtgattctcctgcctcagcctcctgagtagctgggactacaggtgcccaccaccacgcctggctaagtttttataatatttttagtagagatggcgtttcgccaagttggacaggctggtctcaaactcccaacctcgtgatcagcccgccttggcctcccaaagtgctgggagtagaggcgtgagccactgtgcccggtcaaaaatcttatttcttaaaaaaaaaaaagttttagtccaggtgcggtggctcacacctgtaatcccagcactttggaaggccaagatgggtggatcacctgaggtcgggagtttgagaccagcctgaccaacgtggtgaaacactgtctttactaaaaatacaaaaattagccgggcgtggtggggcacgcctgtaatcccagctactccagaggctgaggcaggagaatcgctggaacccagtaggtggaggttgcagtgagccaggattgcgccactgcactccagcctgggcaacaaagtgagacttcatctcaaaaaaaataaaataaaaattgcggggggctaggcacggtggctcacacttgtaatcccagtactttgggaggctgaggcaggtgaatcacctgaggtcagaaatggccaacatggcgaaaccctgtctctaccaaaaatattttaaaaattagccgggcgtggtggtgggagcctgtaatcccagctactagagaggctgaaccaggagagttgcttgaacccaggatggggaagttgcagtgagccaagatcgtgccactgcattccaacctgggcaacaagagcagaactctgtctcaaaaaaaaaaaaaaaaaagaaagaaaattaaatttgagacagggccttgctatgttgcccaggatggcctcgaacttctggccttgaagtcctaggctcaagtgatcctcccatctcagcctcctaagtaggtgagacaaacaggtgctcaccaccatgcatggcttcaactctgttattctaacatccgtgtctctgctcccaggcagtgttcacggacctggagattctcgccgccctcttcgcggctgccatccacgatgtggatcaccctggggtctccaaccagttcctcatcaacaccagtgagtggccctcgccaggggcggggtttgctgagttggaggcggtgttggccaggctgggggcggaactaactaggctggaggaggggctggctggcctgggggcggggctggctggcctggaaaggggatggccgggcaggaggcggggctgggggcggggctggctgggctggaaaggggatggccgggcaggaggcggggctggctgggctggaaaggggatgaacgggcaggaggcggggctgggggcggggctggctgggctggaaaggggatggccgggctggggtagagctgactgggctggaggcgaggctggccgggctggggaggggttagctagttgggggcggagctggccctcctgcggttggagctgcacacgtgggccctcccctgacctccgggctgggctgcagattcggagctggcgctcatgtacaacgatgagtcggtgctcgagaatcaccacctggccgtgggcttcaagctgctgcaggaggacaactgcgacatcttccagaacctcagcaagcgccagcggcagagcctacgcaagatggtcatcgacatggtgggcggggctggggcgggacggagcgggaaaggaagcctaggagtcgagggctttggggaggagtgggtctgagtcccagaggaaccctcaacctggacagagcgggcggcttctacctggtgaaaacttcagaggcccgggtcagtctggggggcgggtgtcagcggccccagtgacgcccccttgcccgcaggtgctggccacggacatgtccaagcacatgaccctcctggctgacctgaagaccatggtggagaccaagaaagtgaccagctcaggggtcctcctgctagataactactccgaccgcatccaggtgcccccacgccccatcatctaaggagggaggacactcccccagccacacctttaggtctgggtagctaactgccccttcctcagcctctttctcccaagtggcccatcttcctgtgtccttctttctttttttttgtttgtttgtttttgagacggagtcttgctcttgttgcccaggctggaatgcaatggcgccatcttggctcaccacaacctccgcctcccgcctcccgcctcccgcctcccgggttcaagcgattctcctgtctcagcctgccgagtagctgggatcacaggcatgcgccaccatgcccagctaattttgtacttttagtagagagggtttctccatgtctgtcaggctggtctcgaactcccgacctcaggtgatccccccccgccccccgccttggcctcccaaagtgctgggattacaggcgtgagccaccgcgctcagccctctttttttaaatttatttttatttactttgtatgtttaaaggagagttggggtctcactatgtcacccagtctggtctcaaactcctgagctgaagttatcctcctgtcttggcctgccaaagtgctgggatagctggcgtgagccaccacacctgacctctttctgtctgtccccttctccatcttcactttccaatcccatctctccttcccatctctcccaccatttcctcccatttcccccaattcctcctttcttctcatcaactccttccaggtcccctgtccctctccctaaccatcttctcttccctcaccccccttccgactcctcccatattttctccatctcccacacacctctccccgttacctcctctgttctctgttctccccaccttctctccctactccctccctccccaggtgggagataagaaagcctgaaagctgggtgtggtggctcacgcctataatctcaactactccagaggctgaggcaggaggactgtttgaggccaggagtttgagaccagccagagcaacattgcaagatcctcttttcctttcctttcctgtcctgtcctgtcctgtcctttcctttccttcttctttctctttcttcttttctgtttttggttttttttttttgagatcgggtctctctgtcacccaggctagagggcacggatcttggttccctgcaaactccgcctcctgggctgcagcaattctcctgcctcagcctctagcgtagctgggattacaggtgcctaccaccagacctggctaatttttgtatttttagtagagatggggtttcgccatcttggccaggccgatctcaaattcatgacctcaagtgatctgcccaccttggcctcccaaagtgctgtgattacagatgtgagccaccgcgcccagccccattcttttttttttttttttttttttctgagatggagtctcactctgtcgcccaggctggagggcagtggcttgatctcggctcacggcaacctccgcctcctgggttcaagcaattctcctgcctcagccccactatagctgggattacaggcatgtgccaccgtgcctggctaatttttttgtatttttagtagagacagggtttcaccatgttggccaggctggtcttgaactcctgacctcatgatccacccgcctcagcatcccaaagtactggaattacaggcgtgagccacagtgcctggcccccatttcttaaaaaagaaggaatgcctgaggtctcagactgggacacaggcatagcctctgaagtttcccctgtgccccaaccccatgcaggtcctccggaacatggtgcactgtgccgacctcagcaaccccaccaagccgctggagctgtaccgccagtggacagaccgcatcatggccgagttcttccagcagggtgaccgagagcgcgagcgtggcatggaaatcagccccatgtgtgacaagcacactgcctccgtggagaagtctcaggtacaggctcggggcattgatggacgggcacagggtgagtctccccagcccatcttggcctgaagttctgaggcccaggagctcctcccctgcctttccacaatgccaagttgtcctgtttttggttttgttttgtttttgagacggagtctcattctattgcccaggctggagtacaatggcacgatcttggctcactgcaacctccgcctcccaggttcaagtgattctcctgcctcagcctcccaagtatctgggattacaggcgtgcaccaccatgcctggctaatttttgtatttttagtagagatggggtttcaccgtgttggccaggctggtcttgaactcctgaccttgtgatctacccgccttggcctcccaaaatgccaggattacaagtgtgagccactgcgcccagcctcctgtttttcttttatttaggttttatttatttattttgagaccgggtcttgcactgttgcccagggtagcatgcagtggtgtgatcatagctcactgcagccttgaattcctgggctcaagcgatcttcctgcctcagcctccagagtagctgagaatacaggtgcacaccaccacacctagctaattttttaaaattttttgtcgagacagggatttgctatgttgccagacttgtcttgaactcctgggctcaaaccttggcctcccaaagtgctgggatatggggtgagtcaccatacccggccttgttttcatttttctttttcttttttttctgagacagggtctcattgtgccacccaggctggagtgcaggggcgtgatcttggctcactgcaacctccacctcctgggctaaaatgatcctccacccccgcctccagagtggctgggactataggcgtgcaccaccacactcggctaatttttgtatttttcatggagatggggttctgtcatgttgcccaggctggtctcgaactcctgggctcactcagtctgcctccctcagcctcccaaagtgctgggattacaggggtgagccaccctgcctggcccctccccactttatatcctccctggtgaaacccaaccatctgagtttgatgtctctacccgtccagacctgagtttctaggcctcagcactgttgacatttgggtgatcattttttgtgctaggagctgccgtgggtattacaggattcttagcagaatccctggtctctctctacccactagatgccagaagtatccccctcctcattttttttttttttgagacagagtttccttcttgtcacccaggctggagtacagtggtgcagtctcagctcactgcaacctccgcctctcgggttcaagcgattctcctgcctcagcctcccgagaagctggaattacaggcatgcgccaccacgcccagctaattttgtatttttagtaaagatggtgtttctccatgttggtcaggctggtctcgaactcccgacctcaggtgatccgcccacctcggcctcccaaagtgctgggattacaggcataagccaccgcgcccagcctccccctgctcatttgtaaagaccaaaaatgcctccagacattgccaaatgtcccctaggtgtgcaaaatcactcacacacaccccatggaaaactaattttatacactttataacgtagttatgttcataggcaacttcatagcaatagtttgtggctttagcttttttttttttttttttttttttttttttttttgagatgaagtctcactctcgttccccaggctggagtgcaatggcgcgatcttggctcactgcaacctctgcctcccgggttcgagccattgtcctgcctcagcctcctgagtaggtgggattacatgtgcccaccaccatgccctgctaatttttgtatttttagtagagacagggtttcaccatgttggccaggctggtcttgaactccagacatcaggtgatccacccacctcagcctcccaaagtgctgggattacaggcgtgagccactgcatccggcctacttttttttttttttcctgagacggagtctcgctctgatgcctaggctggagtgcaatggcacaatctcggctcactgcaacttccacctcccaggttcaagcaattctccctgcctcagcctcccgagtagctggaattgcatttagctttttaaaaaataggccaggtgcagtggctcacgcctgtaatcccagcactttgggaggccgaggtgggctgatcacaagatcaggagatctagaccatcctggctaacacagtgaaaccccgtctctactaaaaatagaaaaattagccaggcacgatggcgggcgcctgtagtcccagctactcgggaggctgaggcaggagaatggcgtgagcccgggaggcagaggttgcagtgagccgagatcgagccactgcactccagcctgggtgacagagcaagactccgtctcaaaaaaaaaaaaaaaaaagtgtgtgtgtgtgtaaactgcatcaatgtatacatttttttgtttttgtttttgagacggagtcttgctctgtcacccaggctggagtgcagtggtgcgatcgcagctcattgcaatctccgcctcccaggttcaagcgattctgtctcagcctcccaagtagctgaactacaggcatgcaccaccacaaccagctaatttttgtatttttggtagagatgcggtttcaccatgctggccaggctggtctcgaactcctgacctcaaatgatccgactgcctcagcctcccaaagtgctgggattatagacatgagccaccatgcccggcccataagcatgtttttcatttcattagctcccataatgtggtggtatcatccaccccataggccgcccatttatactttcttcccctccaccaggtgggttttattgactacattgtgcacccattgtgggagacctgggcggaccttgtccacccagatgcccaggagatcttggacactttggaggacaaccgggactggtactacagcgccatccggcagagcccatctccgccacccgaggaggagtcaagggggccaggccacccacccctgcctgacaagttccagtttgagctgacgctggaggaggaagaggaggaagaaatatcaatggcccagataccgtgcacagcccaagaggcattgactgcgcagggattgtcaggagtcgaggaagctctggatgcaaccatagcctgggaggcatccccggcccaggagtcgttggaagttatggcacaggaagcatccctggaggccgagctggaggcagtgtatttgacacagcaggcacagtccacaggcagtgcacctgtggctccggatgagttctcgtcccgggaggaattcgtggttgctgtaagccacagcagcccctctgccctggctcttcaaagcccccttctccctgcttggaggaccctgtctgtttcagagcatgccccgggcctcccgggcctcccctccacggcggccgaggtggaggcccaacgagagcaccaggctgccaagagggcttgcagtgcctgcgcagggacatttggggaggacacatccgcactcccagctcctggtggcggggggtcaggtggagaccctacctgatccccagacctctgtccctgttcccctccactcctcccctcactcccctgctcccccgaccacctcctcctctgcctcaaagactcttgtcctcttgtccctcctgagaaaaaagaaaacgaaaagtggggtttttttctgttttctttttttcccctttccccctgcccccacccacggggcctttttttggaggtgggggctggggaatgaggggctgaggtcccggaagggattttatttttttgaattttaattgtaacatttttagaaaaagaacaaaaaaagaaaaaaaaaagaaagaaacacagcaactgtagatgctcctgttcctggttcccgctttccacttccaaatccctcccctcaccttcccccactgccccccaagttccaggctcagtcttccagccgcctggggagtctctacctgggcccaagcaggtgtggggcctccttctgggcttttcttctgaatttagaggatttctagaacgtggtcaggaatagccattctaggcggggctggggccagggtggggggcagtcactgtgggaggtcccagctccagcccccctctggtttgctgcctcctctcccctctaaaaaagtcttccgcttgattttgcacaatcccggcgatactcctggcgatactgactagaaagtcagggagctgggggagctgttcactttaggatacgggggtggtatggaagggagcgttcacaccgccagcctcgggcctgggatttgaggagggccctagacctcctccactctccatcccctttcccttccactttgggttcactttgaattttctccgttttttggggcagtggctctgatccactcacccccccgccccccgccccacttctagctgcttctcctcttgtttctgccttaataattcccacggccacaggcaagggggttgcagtggccgcctgcaccttggatgaggcagggccaggcgcccagaacccccatcctggccgcacccccctttccagggtcctccggaccccaccttccacactctgatcacagcccccctaccttttgccctaggaggaagcaataatggtgtataccctcattctcattcctgggcagcccttccttccaccctggcaccaaaataatttctcctccatccgtaccttgcctagcctctccctctcccccagctagtccctgagcaatacggcagacagatgcaagaccatttttctccaagccatgggggactgtttggaaggaaagccccctctctccctcctcccctcgccctcggcctggttctgcagctggaccgacctcattcatcgcctgccccctacccaattctgagcacacggtactgtagcccccagttcctccctagccttccatccctctgtccaccccagggggaggtaaccccgcactcacactcccttgatgctgtctgtacagggttcatattttgtagcgaaagtcgtttttgtcccagccggcgatcggagtgggccttttctttctttttgttcattctttacctttttttcttttctttctttcttttttgtacatactgtaaggttggtttgtaaattattctacggaggcaaaaagggaaaataaaaacttgcccttccctggctgacccagtcgggaaggtagggaaggaggtctcccgttgggagagtctctgttcctgctgtattatacaaactgtaccatagtcctgggaaaagggtggactcaccgctgttgttttatgggaagtcgtgtcatcctaggggttggggctgggcagagcctgtcccctccccccttctccaggagccagggggtgactggagagacagacccacccccaagcagggctcctctccccagggtgagcacaggacctctgtaagctgcttgtgtattgtccactttgacgatcagtcattcggtccgttgatcaataatccttcgatcttgtctccaattaaaccgaggctttcaccgattttcctggctgatgtggcttcattccccatgttgtttgttgaggtgtctccccgctgcaccgtctgcttgggttggggagggagtttctgtccctacttgttccccagcagacggaattgtgaagtagagcttggacagagacattccccagcctgagtcaggttataaaatggaaattcaagccatgcagggtttgttttgttttgttttgtttttgagatggagcttccctcttgttgcccaggatggagtgcaatggcgccatctcggctcactgcaacctccgcctcccgggttcaagcgattctcctggctcagcctcccgcgtagctgggattacaggcgcccgccaccatgtctggctaattctttgtatttgtcgtagagatggagtttcaccatgttggtcaggctggtctcaaactcctgactttgggagatccacccgcctcaacctcccaaagtgctgggattacaggcatgagccattgcacccagccccatgcagtatttaaaagggaaaagatgtggctgggcgcggtggctcacgcctgtaatcccagcaccttgggaggccgaggcgggcggatcatgaggtcaggagtttgagaccaacctggccaatatagtgaaaccccgtctctactgaaaaatagaaaaattagccgggcgtggtggtgtgtgcctgtagtcccagctacttgggaggctgaggcagaatagcttgaacccaggaggcggaggtttcagtgagctgagatcatgccactgcactccagcctgggtgacagaacgagactttgtctcgaaaagaaaaaaaaaaaggcaaaagactacccagtgcaaaggctcatgcctgtaatcccagtgttttgggaggccgagatcagcgcaggagttcaggacaagcctgggcaacatagtgagaccctgtctctattaaaaattttaaaaattggtcaggcacggtggctcatgcctgtaatcccggcactttgggaggctgaggcggctggatcacctgaggtcaggggttcgagaccagcctgaccaacatggtgaaaccctgtctctactaaaaatacaaaaattagctgggcatggtggcgcattcctgtaatcccagctactcaggaggctgatacaggagaattgcttgaacccgggaggcagaggttgcagtgagccgagattgtgccacttgtactccagcctgggtgacagagtgagactctgtctcaaaaaataaaaaaaaaattttaaaaagttagccagtggtggtggaccatccctgtggtcccaggtacttggaaggctgaggcaggaggattgcttgagcctgggaagtagaggttgcagtgagacgtgcccatgccactgcactccagcctggacaacaagagcaaaaactctctaccaaaaaaaaaaaaaaaaaattaatggcatggtctctctctgttttccaggctgaagtgctgtggcacaatcagctccctacagccttgaacttctgggttctagagatcctcctgcctcaccctacctagtagctgggattacaggtggatgccaccacacctggcctaacccacatacttgaatgctgttaattccactcacagagcctaattttcccacatttattaggctttttttttttttttttttttttggtggcagagtgagactctatcacccagtctatagtgcagtggtatgacatgatcatagttcactgcagcctcaacctcctggacttcagtgatcttcctgcctcagcctcccatgtaggcaggaccataggcgggtgccaccacgcccggctaatttattttttattttgtagagacagggtctcggtttgttgcccaggctggtctcaaactcctgggctcaagcaatcttcccaccttggcctcccaaagtgctgggattacaggcgtgagccaccacacccagccctgttaggctgattaacaagcccctggttttaccaataggtttctgacattcattatactaatgagcaaaacttctgaatatagataaagatatggatagtggaaatgtttgtgatttggaccttgattagaatactggctgcctcggctgggcgtggtggctcactcctgtaatcccagcactttgggaggccgaggcaggtggatcacctgaggtcaggagtttgagaccagcctgaccaacatggtgaaaccctgtctctactaaaaatacaaaaattacctgagcgtggtggcacgtgcctgtagtcccagctacctgggaagctgagacaggagaattgcttgaacctgggagctgcaggttgcagtgagcccagattataccactgcacttcagcctgggcgacagatcgagactccgtctcaaaaaaagaaggaaaaaaaaaaaagaatactggctgcctctggggcttaataaaccaggatgcacatgaatacatacagtgcttgagtaggtagacacaagggggcactagacatatatttttatacaatgcatgttctgaaacatgagagcatcttgcgtgggtccaaggaaaagtccacctgcctactctgccatttgtttctagtccagggactctgagatttttttctatttttcttttcttttcttttttttttagacgcggattggttctgtcacccaggctggagtgcagtggcatgatcagggctcactgtagcctagaccctctgggcccaagtgatactcccaccttagcctcctgagtagctggaatgataggtgtgcaccaccaagcccagctttttttttttttttttttttttggtagagatggggatctccttatgctgatcaggctggtcttgaactcctgggctcgagagggaatctgattggtgatcttgggggcgatctctctgagcttcacttgtttcttctactaaatggggatatattagctgagtgtagttgtgcgcacctgtagtcccagctactccggaggctgaggcaagaggatcacttgagcccaggaggtcgaggctacagtgaactgtgattgtgccagtgcactctagtctgggtgacagagtgagacactgcctcaaaaaaaaaaaaaaaaagtaaataaataaaatggggccaggtgtggtggctcacacctgtaatcccagcactttgggaggctgaggcaggcggatcacctgaggtcaggagttagagaccagcctggccaacttggtgaaaccttgtctgtactaaaaatacaaaaattagccaggcgtgctggcggggatctataatcccagctactggggagtctgaggcaggagaatcacttgaacctgggaggcagaggttgcagtgagccaagatcgcaacattgcactccagcctgggcaacaagagtgaaactccatctcaaaaaaaaagaattaattatttaaataaaatgggataatgacagttacagagttaaacagttgctctatagtacggtttggctagtaaaactttctttaaaaaaaaaaaggtgtagagatggggtctcaccatgttacatgcccaagctgatctcctcgaagtcctgggctcaagcaatcctcctgccccagcctcccaaagtgctaggattactagcactttgaccctaaaatcaggtgtgagccactgttcccggcctcagtaaaactttctgtggtaataggaatattctttatctgtgctatccaacaagtcagcaactagtcacatgtggctattgcgcccttgaaatgtggccagttttaatttccggccacagtggtggccagaagctactgtattggacttaaattctaaaaattcagccagagttaatggaaaatatttaggctatacaaagagttgtttgacaacagctgtaaagattcacagaagatagaacctagaaaagtgggaggagagaagcagagctcgaaaaataggtagaagttttcagggaatctgaactttgcaagaagtgaaaaggagacacagacattttccccagggactttcaaatggaggcagagtcgggaaaagggctttgggctgggggtcaggaggtgacagcactaattctagcctgcagtggactgtgggtgaccttagacgagatttctccttccaggcctcagtttccccaagtgtaaaagggtgggctgggtgcggtggctcacacctgtaatcccaacactttgggaggccgaggcaggcagatcacttgaggtcaggagttggagaccagcccaaccaacatggtgaaacccgcgtctcaactaaaaatacaaaaagattagccaaatgtggtggcacatgcctgtaccagctactcagaaggctgaggcaggagaattgcttgaacctgggaggtggagcttgcagtgagctgaggtcaagccactgcactccagcctgggcgaaagagcgagactccgtctaaaaaaaaaaaaaaaaaagaccaggtgtggtggctcacacctgtaatcccagcactgtgggaggccgaggcgggtggatcacctgaggtcaggagatcaagaccagcctgaccaatatggtgaaaccccgtctctactgaaaatacaaaaattagctggacgtggcggagggcacctgtaatcccagctactcgggaggctgaggcaggagaatcgcttgaacccgggaggtggaggttgcaatgagctgatatcatgcccctgtacttcagcctgggtgacagagtgagactttgtctcaagaaaataaaaaaatttttttaggccgggcgcggtggctcacacctgtaatcccagcactttgggaggccgaggcgggcggatcacaaggtcaggagatcgagaccatcctggctaacacggtgaaaccccatctctactaaaaatacaaaaaattagccaggcaaggtggcaggcgcctgtagtcccagctacgcgggaggctgaggcaggagagtggcgtgaaccccggggggtggagcctgcagtgagccgagatcatgccactgcactccagcctgggcgacagcaagactccgtctcaaaaaaaaaaaatttttttaaaaaaagggcagatgtgatgttcggaacacctcctgtattgggacagactgaaaatatgggtcaaaaatggcagtgatggccgggtgcggtggcccacgcctgtaatcccagcactttggaaggccgaggccggtggatcacctgaggtcaggagttcgagaccaacctggccaacatggagaaaccccgtctctctaaaaccccaaaacttatccaggcatggtggcacacacctgtagtcccagctactcaggaagctgaggcaggagaatcgcttgaacccgggaggcagaggttgcagtgagtggagattgtgccattgcactcaagcctgggcaacaagagtgaaactctgtctcaaaaaaaaaaaaaaaaaaaaaaatggcaatgacacatgaccatcagctggctctccagggtggggaattcaccttttttccagcaaaggtgaacaagggcagtggggcacagcagggaggccacgtaatctgaaggaggccaggggaacctggggaaggagtggagtcggttcattatctgaaattgacatcaaggcttgcaggcttcctggtactggtcttgagcaaatggctccgcctctcccagactttagagggctctatcctgtgctaaactttttaagattatctcattgactctccagctgttcttgagatatggactagcattggttccattttgcaattgaagaaactgagggctgggatgagatcgcacaatatggagaaaattcgaggaaataagacgaggacctcgcttcacccagtgcctgttcaacagtgatagctgtccccatacttttatgttatttcaggtgcacgaaatcttgagatgtaggtagtatttctccctctctaacagcataaaaacgtgtcagtgccggccaggtgtggtggctcacgcctgtaatcccagcactttggacgtggtggcgggcacctgtaatcccagctactcgggaggctgaggcaggatagtcccttgaacctggaaggtggaggttgcagtgagctgagatcatgccactgcactccagcctgggcaacaagagtgaaattccatctcaaacaacaacaaaaaaaagtcaatgcaaatcaaaataagacatttattttttattttcttttgcaaagcattttcacagctcatttctgttcgtgcaagctagaacatacagctttccaggaatggtctgacaatatttatcaaaaacataaccagctgggcgcagtggctcttgcctggaatctcagcacttttggaggctgaggtgggaggatcatttaagcctaggaattcaaaaccagcctgggtgacatagtgagacatgtctgtctgtctttctttctttctttctttctttctttctttctttctttctttctttctttctttttctttctttctttctttctctccttccttccttccttctttccttccttccttccttccttctttcttttctttctttcgagacaagatctcactctgttatccaggctccaggctgcagtggctaattgcagactcaacctccttaggctcaggtgatcctcccaactcagcctcccaagtagctggtattagaagcatctgccaccatgccaggctaaatttttttttttttttttttttgctcttttgtagagatggagtctcgccatgttgcccaggctgttctcaaactcctggactcaagcgatcctcctgcctcgcccccccaaagtgctgggattacaggtgtcaaccatcgcacctagacctgagacatgtttctaaaaaaaattttttttttgagacaatgtttcactcttgttgcccaggctggagtgcaatggtgtgatcttggctcactgcaacctcggcctcccgggttcaagcgattctcctgcctcagcctcccaagtagctgggactgcaggcacccaccaccacgcccggctaatttttttatttttagtagagatggggtttcaccatgttgtcctggctggtcttgaactcctgaccccaggtgatccgcccgccttggcctcctaaagtgctgggattacaggcgttagccacagtgcccggccaaaaatttttttttttttttagacggagtttcgctcttgtcgcccaggctggagtgcaatggcacgatctcagctcaccgcaacctctgccttccgggttcaagcaattcccctgcctcagcctcccaggtagctgggactacagggatgcgccatgacgcccgactaatttttgtatttttagtagaaacagggtttcaccatcttggccaggctggtctcgagctgctgacctcatgatccacccgcctcgacctcccaaagtgctggaattacaggcatgagccaccgtgcctggccaaaaaatatttttttaaagatgcaactgcttggccaggcacggtggctcatgcgtgtaatcccagtactttgggaggccaaggtgggaggatcacctgaggtcaggagttcaagaccagcctggccaacatggtgaaaccaacctcatctccacaaaaataacaaaattagccaggcatgatggtgggtgcctgtaatcccagctactccagaggctgaggtgggagaatcgcttgaacccatgaggtggagggtgcagtgagccgagatcgtgccgttgccctccagcctgggtgacagagtgagactgtctaaaaaaaaaaaaaaaaaaaagatgcaaagatgcaaatgctcaaatatctaaagtaaaaaatgtctctattctccttggtcagaatagtgaagaattattaataatccaggtgaccactattaaggagttattaaattacttttcacctatatgatggaataatatgcaaccattaaaaatgatcaagtgggctgggcgcagtgacttacgcctgtaatcctagcacttttggagaccgaggctcgtggattgcctgagctcaggagttcgagaccagcctgggcaacacagtgaaaccctgtctctactaaaatacaaaaaattagacgggcgtggcagtatgcgcctatagtcccagctacccgggaggctgaagcaggagaactgcttgaacccaggaggccgaggttgcagtgagccgagattgtgccactgcactccagcctgggcaacagagcaagactccgtctccaaaaaaaaaaaaaaaaaaaaaaaatcaggtggatctatgtttattgaaatggccagagatattcacagtcagaacagcaggtttcaaaatattctgtattatatgatcctactgaaaagtaacatgcagagaaaaggcagttacccatccagatattcacagtgtctccagtggtgggattaagaaagatctgtgtcttcaaacactgcggaaggccgcagggtcctctgcctaggaaaaccagagacctttgttcatatgtttatctgctaaccttctctccactattgtcctatgaccctgccaaatccccctctccgagaaacacccaagaatgatcaataaatactaaaataattttttaaaaaagaaagatctgtgtcttgtgtagtctttgacattttctgaacattttgcaatgagcatatattacattcattgatgatcgattgattgggacagggtctcatttgtcacccagactggagtgtagtggtgcaatcacagctgactgcagtctcgacctctcaggctcaagcaatcctcctgcctcagcctcccaaatagctgacaggcacctgcccctgcccccagctacttaaaaaaactttttgtaaagatgggttctcactatgtcgcccaagctggtctcaaactcctgggctcaagcgatcctcctgcctcagtgttgggattacaggcgtgagtcactgcacccagtctatattacttttataatcagaaagttattttataatcaggggaaatgaaaaacatctggtatttattatctgggaggcacaaaaacgtggtggataagcacacagattctagattcagctttcctggattttggctccaactcagccaagttaatggctgggttagtctgggcaggttactggccaaggggggaaaccatgcctcagtttcccccattgtaaaatccaaataacaatagcttaggtttaccgagaggttgttatgtgacaagcactgtttgttttacgtaaatcatcgaggtaaatgctcacaacagccctattaagtaagtactattattataaaaagggtcacaggcataggcagggaaggaggtagggctgggagtcggagcccgtgagcgccccctagagtagggctaaggggcgggggggcgggctacagcagaatagggacccagcgcactcgcagaacgaggggggaggcgaggcgagaacgagcgggagtttttttcccgactacgattggctggtgtaattgtcatcacttgaaaaggcagccaatgagaggcgcggtcgcctcgctggtggaagccgagagctgagcgaagtgaggcgtgcggagccaaaggcgctagagcgatagcgggagccccggaccccgaagcggttgaggggatccaggcctcacaacgtcttgagagtggccccagcgtcgttcctagtctcttcggcagaccccagcgtcgtccttcttttcctgagaatatcctgacaccagtcgcccgttccagaaggggacacttggcgtcatccctttttttctgagtgaccccagagtcgtcctcacttcctgagggggatcctggcgtcatccgcccttcttgaggggaccctgctgtcactaccctgtcctgatggccagcaccgcattgtcctttcttcccgcgggaaacccggacatcatcccctctttctggcggggacccccatgccattatcccctcctgaggagaccccagagccagagccgtccccccttcctcaaggctccccagcgttgtttcttcttcccgagaaggggcctggtgctgttccccgtttccagagtgtttcctatcgttgtcctccccacactcagaaggcatctgtcatcccccctttttctgagatcagtcccttcctcctttccagtttaaggccgacccctgcaaacgcttctgtggcacccatagatagaaggcccaaagacccccctgtgctcccttgcccccaattgagcagacgggaaggcaaaagactcagctcaccccatgaagatgggaagaaaccgaaactagctgatgaaggaactcactatgccacatgagaaatcatttagggccgggcgcagtggctcacgcccataatcccagaactttgggaggccgaggttatcatataagatcaggagttcgagaccagcctggccaacatggtgaaaacccgcctctactaaaaaatacaaaaattagccgggagtggcggtatgggcctgtaatcccagatactcaggaggctgaggtaggagaatcgcttgaacccagcaggtggaggttgcagtgagccgagatcacaccactgcattccagcctgggcaacagagtgagactccatctcaaaaagaataaataaataaaaagaatttgccagtcaacaacaatttttttttcttgcctcccgggttcacgccattctcctgcctcagcctcccgagtagctgggactatgggtgcctgccaccacgcccggctaattttttgtatttttagtagagacggggtttcaccgtgttagccaggatggtctcgatctcctgacctcgtgatccgcccacctcggcctaccaaagtgctgggattacaggtgtgagccaccgcgcccggtcaaatacaaaattttaaaacaacttttatatatactcagttaaggcagacaaaacaagtctctgattatttcattcactgaggcaatattaatttttgagacacttccacacagatttacattttaaaaaaaatgtcaggtgcggtggctcactcacacctgtaatcccagcactttgggaggctgaggcgggcggatcacgaggtcaggagatcgagaccatcccggctaaaatggtgaaaccccgtctctactaaaaatacaaaaaattagccgggcgtagtggcgggcgcctgtagtcccagctacttgggaggctgaggcaggagaatggcgtgaacccgggaggcggagcttgcagtgagccgagatcgcgccactgcactccagcctgggcgacagagcgagactccgtctcaaaaaaaaaaaaaaaaaaaaaaaaggaaacttaagggccaggcacggtggttcacgcctgtaatcccagcactttgggaggccgaggtgggcagatcacctgaggtcagaagttcgagaccaacctgaccaacatggagaaaccccgtcactactaaaaatacaaaattagccaggcgtggtggtgcatgcctgtaatcccagctactcgggaggctgaggcaggagaattgcttgaaccggggaggcagaggttgcagtgagccaagatcacaccattgcactccagcctgggtaacaagagcgaaactctgtctcaaaaaaaaaaaaaaaaaaaaaaaaaaaaaaaagaggctggggggtggctcatgcctgtaatcccagcactttgggaggccaaggagggcagatcaggaggtcaggagatcgaaaccatcctggccaacatggtgaaaccccgtctctactaaaaaaaaaatacaaaaaattagctgagcgaggtggctgatgcctgtagtcccagctactcgggaggctgaagcagaatggcgtgaacctgggaggcggagcttgcagtgagctgagatcgcgccactgcactccagcctgggcgacagagcgagactccgtctcaaaaaaaagaaagggaaacttaaaatattcataaagattaatcgagtgaaaggccaggtgccgtggctcacgcctgtaatcccagcactttgggaggccgaggagggcggatcatgaggtcaggagatcgagaccatcctggctaacacggtgaaaccccgtctctactaaaaatacaaaaaattagccgggcgcggtggcgggcacctgtagtcccagctactcgggaggctgaggcaggagactggcatgaacctgggaggcggagcttgcagtgagccgagatagcggcactgcaatccggcctgggagaaagagcgagactccatctcaaaaaaaataaaaaataaaataactgagtgaagggggacaggtgctttggcttatgcctataatcccagccctttgggaggctgaggcaggagaaactcttgaggtcaggagttcaagaccagcctgggcaacatagcctgcttggtggcgtacacctgtggtcccagctacttgaaagactgaggtgggaggatcacttaaaactgggaggtcatgcctgtagtagtgagccttgatctggccatagccctccagcctggacaacagagtcactctgtctcgaaaaaataaataaaaataaaaaaataaactgagagacggccaggtaggatgacatgtgaggagtagacggatgtagggtagaaataaaagagaccccatgtaggatagttgagacttgagggaaaaataaaccaacttcttgggtaatgtaattattagtctttcaggcccctgaagctgagcgtaaatgaaggctgaggcaactgaagttggcactaggagattcggtttccttttcttaccacccttatcaagataattgcttaatcccggaggatcctgggacatgtagtctaaaaagagtgttcctgctttaaaaggtggcaccggccgggcgcggtggctcacgcctgtaatcccagcgctttgagaggccgaggcgggcggatcacgaggtcaggagatcaagaccatcttggctaacacggtgaaaccccaactctactaaaaatacaaaaaattagcccggcgtagtggcaggcgcctgtagtcccagctactcgggaggctgaggcaggagaatggcgtgaacccgggaggcggagtttgcagtgagccgagattgcgccactgcaccccaaactgggtgacagagccagactccgtctcaaaaaaaataaaataaataaaataaatataaataaataaaaggtggcaccacaggccgggcgcggtggctcacgcctgtaatctcagcactttgggaggctgaggcgggcagatcacgaggtcaggagttcaagaccaccctgaccaatatggtgaaatcttgccactacttaaatatacaaaaattagcgggacatggtggcacatgcctgtagtcccagctacttggaaggctgaggcaggagaatcgctcgaacccaggaggcagaggttgcagtgagccaagatcacaccactgcgctccagcctgggcaacaaagcgagactctgtctcaaaaaaaaaaaaaaaaaagtttgcgccataaaattagttacaaccctgagcagtggatagggtgctggtgcttgcaggagggcgagtcctttaaatagggaactccctcaaagcatgtgcacttttatttgatttataagaaatatcatttggtccaaagttttgaagaatgaaacagatgtttgctcttgttgcccatgctggagtgcagtggttaagatctcggcttaccacaacctccacctcccgggttcaagcggttctccttcctcagcctcccgagtagctaggattacaggcatgtgccaccacgcccggctaattttgtatttttagtagagacagggtttctccatgttagtcaggctagtctagaactcccgagcttaggtgatctacccatctgggcctcccaaattgctgcgattacaggcgtgagccaccccacctggcccggagaatgctacttttaaaaataggaacaagccaggagctcatccaatcttgttccttttctaactttctttctctggaaatagttccttttctaactttctttctctgggcctctttcacccagaggcccacaagagggtgctgtctgccttttagatggaacttcctgactctgccctgagggtattcatcccagagctatacctcccgggttcaagcgattctcctgcctcagcctcccgagtagctgggattacaggcacatgccaccacgggcagctaatttttgtatttttagtagagacagtgtttcaccatgttggccaggctggtcttgaactcctgacctcaggtgatccgcctgcctcagcctcccaaagtgctgggattacaggcgtgagccaccacacccagccttattttattttagagtcaggggtattgctgtgtcacccaggctagagtgcagtggtgcagtcatagctcagtgcagcctcaaactcctgggctcaagtcacctcccgcctcagcctcccaaagagttgtgattactggcatgagccattgtacctggacagcctgtgaattttacttatttattatttttatttttgagacagagtcttactctgctgcccaggctggagtgcagcggcgcgatcttggctcaccacaacctctgcctctcgagttcaagtgattctcgtgcctcagcctcctgagtagctgggattacaggcgtgcaccagcacccccagataatttttgtattttttagtagagacagggtcacactacgctgtccaggctggcctcccaactcctgagcttaaacaatccacctaccttggcctcccaaactgttgggattataggcaggagccaccacacctggcccagcctatgaattttatctatttatttatttattattattattttttgagacggtgtctcgctcagtagcccaggctggggtgcagtggcgcgatcttggctcactgcaagctctgcctcctgggtttacgccattttcctgcctcagtctcccaagtagctgggactacaggcgccagccactgcgcccggctaatttttttttttttttgtatttttagtagagacggggtttcaccgtgttagccaggatggtctcgatctcctgaccttgtgatccgcccgtctcggcctcccaaagagctgggattacaggcgtgagccactgcgcccagccatgaattttaaattatacaactaaagtggtctgctgtgaaatgttatcatgatcattctaacgtcaacagtcttgacaattctgcccaatttcagcatttcaggtttccagtacttaactcattcctaagtaaataatactacattacaaggcaaggtgacacacacctgtaatcccagcactttgggaggccgagtcaggggatcccttgagcccaggagttcaagaccagcctgggcaataaggcaaaacctcatttctataaaaaatacaaaaattagctgggcatagtggcacatgtctgtagtcccagttactgaggaggctgaggtgggaggatcacttgagcccaggaattcaacgctgaagtgagctactatccctccacttcagccggggcaacagagcaagaccttgtctctgggaaaaaaaaagaaaaacttgaaagagaagaactattgaggaaggaaaagggtgatacctttggttgtgtctaaatttaccaggctgcacgtggtggctcatgcctataatcccagcactgtgggaggccaaggtgggtggatcacttgaggtcaggagttcgagaccagcctggccaatatggtgaaacactgtttctactaaaaatacaaaaattagctgggtgtggtggtgcgcagctgtaatcctagagactcgagaggctgaggcaggagaatcgcttgaaccctggaggaggaggttgcaaaactccgtcttgaaaaaaaaaagtaggccgggcatggtggctcacgcctgtaatcccagcactttgggaggccgaggtgggcggatcacctgaggtcaggagttgagatcagcctcaccaacatggagaaatcctactgaaatacaaaactagccaggcgtggtggcacatgcctgtaatcccagctactcgggaggctgaggcaggagaatcacttgaacctaggaggcagaggtcgcagtgagctgagatcccgccatcgcacttcagcctgggccacaagggcaaaactccatctcaaaaaaaaaaaaaaatgaccttggggagccctaggagatgtgactaggaattagctgcttgtcttccaaggcagctgaaactgaaggacaactgtgtggcttgcctacggggagaaagatgccctacatataaaaatgcgatgggcaaagattacaaactggtttcaaataccagccctaagtcaaagaggagtgtgtttcagaagaagagccctttctggcccccggtttcaggcctccagcccagagccagggtgaaagacactagttagtctgttctttattttccttggaaaattacagggttacttatcaacaaaataactgtccatccggtggggaagtgccatccggtggcttctatgtacaggcccatccctgggaaccacatttccagagggggcctccccctgaggcccccattggccccctcccaggtatccaagaataaatcacatggtgacagctgccggcatgggtgagtgggacccaggcctattacccggccagagggtttgggggcctctctcctggaagcctgctctttccacaccccctttcccagccaggctgtcttggacactcccggggctccgctgaggggcacatgattcccgctttggacttcttttgagatgtcattttaacactgaggcatcctggcctcccttcccggaagatgggttatttgcagtgctgtcttttcttttagtcccggtttttgtacaaaaacaatgatactccccattggactgtatttttgcccaagaaacaaaagtgcctcaacaggtacagttctgctggtcaatctgcttccggcagggctccatggtgacagccacgcccaccccactccggcccgatgtcattcgggtcacctcgctccaggtgtctgtatctgggtcgtaacactccacactgtccaggaacgtgtgaccatcatagcctcctgcgggaagaacagaagggatggtcaccacctgtcacaccacatccaagagcaggggacagaaagagagagatgcagctgtgagatgcaaaagcaggccgggcgtggtggctcacgcctataatcctagcactttgcagggctgaggcaggaggattgcttgaggccaggagttcgaagccagcctgggcaacatagcaaaaccttagtctcttactaaaaaaaaaaaaaaaaaaaaaaaatggccaggcttggtagctcacgcctataatcccagcactttgggagactgaggtgggtggatcacttgagtccaggagtttgagaccagcctgggcaacatggtgaagccccatctctacaaaaaaacataaaaatttagccaggcttggtggtgcgcgcctgtagtcctagctattagggaggctgaggtggggaggatcagttgagtctgggaggcagaggttgcagtgagcagaggctgcaccactgtactctagcctaggcaacagagtgagaccctatctcaaaataaataaataaaaataggaaaataggccactcgcggtggctcatgcctgcaatcccagcactttgggaggccgaggcgggcagatcacctgagatcaggagttcgaggccagcctcgccaacagagtgaaaccctgtatctactaaaaatacaaaattagatgcgattggtgatgcacgcctgtaatctcagctacctgggagactgaggtaggagaatcgcttgaacccgggaggcggaggttgcagtgagctgagattgtgccactgcactccagcctggtgacagagcaagactccacctcaaaataaataaataaataaataaacaaaaaataaaaaaataaaaataaaataaaataaaggccgggcacagtggctcatgcctgtaatcccaggactttcggaggctgaggcaggtggatcacctgaggtcaggagttcaagaccagcctggctaacattgtgaaaccccgtctctactaaaaatcaaaattggccgggcatggtggctcacacctgtaatcccatccctctgggaggccgaggcgggcagatcacctgaggtcaggagttcgagaccagcctgaccaacatggagaaaacccttctctactaaaaatacaaaattagccgggcgtggtggcgcatgcctgtaacctcagctactcgggaggctgagggaggaaaatcgcttgaacctgccaggtggaggttgcagtgagccgagatcgagccattgcactccagcatgggcaacgaaagtgaaactccatctcaaaaaaaaattagctaggcgtggtggcacgtgcctgtattcccagctactcaggaggctgagacaggagaatcacttgaacctgggaagcagaggttgcagtgagccaagattgcgccattgcactccagcctgggcaacatgagcaaaactctgtctcaaaaaaataaaataaaataaaataaaaataaacaaaaacattaagctgggcgcggtggctcacacctgtaatcccagcactttgggaggctgaggtgggcagatcacctgaggtcaggcgttcaagaccagcctgaccaacatggtgaaaccccatctctactaaaatacaaaaattagctgggcatagtggcaggcgcctgtaatctcagctacttgggaggctgatgggggagaatcacttgaaaccaggaggcggaggttgcagtgagctgagatcgtgccattgcactccagcctggcaacagactgagactctgtctcaaaaaacaaaacaaaacaaaacaaaacaaaaaacaaaacaggccgggcgcggtggctcatgcctctaatcctagcactttgggaggccgaggcaggtggatcacgaggtcaggagttcgagaccatcctggccaacatggtgaaaccctgtctctactaaaatacaaaaaattagcctggtgtggtggcatgtgcctgtagtcgcagctactcaggaggctgagacaggagaatcgcttgaacccaggaggtggaggttgcagtgagctgagatcatgccattgcactccagcctgggcaacactgtgagacaccatctcaaaagaaaaaaaacattagccgggtgtggtggtgcgcgcctgtggtccctgctacttgggaggctgaggcaggaggatggctggagcccaggctgttgaggctccagcgagctgtgatcacaccactgcactccagctgggcaacagagcgagaccttgtttctaaaaaaaaaaaaaaaaaaaaaaaaaaggaaagcaaaagcaaaagcagtccacaaaagatgggctagtcaggactcttccccgcccccagggcctcaccaaggacgtagattctcccctggtggacagtgatccccagggcacttcgccggtgcttcatgggggctacgaaagtccacgtctctgtttccacatcgtagcgctccacgctgttcagctggtcctgaccatcatagcccccagcagcatagatacagttgtgcaggacgcagacgcctaaagggcaccatgcagagaaggtgactctgggggtctggctttgggaaccccagccatcacctccttgagggagacctttcctctctcctctcccttctcaccctcagaaatgaagcggggagagagagaagcttggactctatcagaatccagggcttctgtggttaccccagcatgagggttgcaacagggggtctctcccaggcctggctcagtttcaccccaggatggtagggggtgttcctgggtgctcccctccctaccgtccccacccacctgccccgcttcggatggtgttcattgctgtgatcattcgccactcgttcctctctgggtagtaacactcagctgaattaaggcggtttgtcccgtcaaagccccccacggcataaaggagacgattgaggacagccacgcccaccccgatccttcgtgtcagcattggggccaccaagtgccactcatcccgctctggctcatacctgcaagggcgtaagaaaaatggggacaatggccattatagctgaccttcgtggaatacttaagggccagatactcttttttttccttttttttttcccccttaaagagacaggttcatccggcgcgatggctcatgcctgtaatcccagcactttgggaggccgaggagggcggatcacctgagctcaggagtttgagaccagcctggccaacatggtaaaaacctgtctctactaaaagtacaaaaattagctgggtgtgatggcagatgcctgtaatcccagctactcgggaggctgaggcgagataatcacttgaacctgggaggcggaggttgcagcgagctgagatcatgccactgcactccaacctgggcaacagagcgagactccatctcaaaaaaaaaaaaagaaaaaaagagacagggtcttgctccgttgtccaggctggagtgcagtggtgcaatcactgaagcttcaaactttttttttttttttttttttgagatggagtgcaatggtgagagcatggctcactgcaacctccacctcctgggttcaagcagttattcagcctcagcctcacaagtagctgggataacaggcacccaccaccacgcccggctaatttttgtatttttagtagaaattgggtttcgccatgttggccaggctggtctcaaacacctgacctcaagtgatctgcctgcctcagctttccaaagggctgggattataggcatgagccaccacacccagcctgcagctatcaactcttgggctcaaggaaccctcctggctcagcctcctgagtagctgggactacaggtgcacaccaccgtgcccacctccactcgaactctagtgcttgcagttgttctccaaggattgaggtatcagcaactccattttccaaatgacaaaactgagcctcctagccatcaattgctcaagttcaaaaacacatctgataaacccctagtggctcagccagatcccccacttcacagataacaagataacatctcagaaaggagaaatcacacattcagcatcactctttgatgctcaaagagtcctttaggtccggcacagtggctcacacctgtaatcgcagcactttgggaggttgaggtgggagaatcccttgaggacaggagttcaagaccagcctggccaacatggtgaaaccccatctctacaaaaaatacaaaaattaaccaggcgtggtggtgggtacttgtagtcccagctaccccagggtctgaggcaggagaatcacttgaacctgggaggcgaggttgcagtgacccaagatgcactccagcctgggcaacagagcaagagagacagggtcttactctattgcccaggctagtctcctggactcaagcaatcctcccacctcagcctcccaaagtccctgattataggtatgggccacagtgcctagcccaacaatttcaaactgatggaacattttccaactccgcacaaaggaaccatatgggtttgtgacagtcccctaagcatttcccagccccaggcacagaatcaaaggtcactgactagaactctccaaggagcttagcttcatcctgaggcctccactccctgaagacaggaagaggaaacagcctcaggaagaatacccggatctcagtgtcttgggacttgccaggagcaggaccctccgagcccacccccaggccctgccactcacctctccacactgttgtggtggatgcagccgtgggagccgccgacggcatagatgtggccatcgatgacccccaccccgatgcggttacggggcacgctcatgggggcgcagggcgaccactgattggtcatggggttgtaacagtccagggcgctggagtcggtgttgccgtcgggcgagttgttcctgccgcccacggcgtacaacagcccgcccaccacgcagccggccaggccgctccgcggcacctgcaggtccgccaaccggagccaggtgccgtcactggggttgtaagcctccaggtagctgagcgactgtcggaagtagccgcccgcggtgtagatcaggcggcccaccttgggcgcccggcagggcatcacctgcgtgggcttgtgcagggtgagctcctcgaagatcttgaccaggtagtccttgcagcgggagtcggactgcaggatctcgcacttctgcagctgcatctgcaggaagttcggcgtcaacgagtggcagcgcacggcccgcagcagcgcctggacgtagaaccgtcgctgttcgcagtcgtacttgacccagttgatgcaggcgtggaagacctcggactcgcagcgcacgttcaggtcgtcccggctgatgagggtcaccagttggcagtgggacaggttgaagaactcctcttgcttggccacctgcagagggcgacagtgggacgggctgactctccagtcacccccacacctcaccaagcaggaccgggacaagtaacttatcactgccgctgacagtctcagcttccttatctgctaaatggggattcaaataataggaaccgcgtacattgtgatgactaaatgagttaatcctgccgggcgcggtggctcacgcctgtaatgccagcactttgggaggccgaggctggcggatcacgaggtcaggagttgagagacaagcctggccaatatggtgaaaccccatctctactaaaaatacaaaaattacccgggtgtggtggcacacgcctctagtcccagctactcgggaggctgaagcagaagaatcgcttgaacccgggaggcgggaggcggaggttgcagtgagccgatattgcgccactgcactccagcctgggcgacagagcaagactctgtctcaaagaaaaaaaaaaaagagttaatactatgtgccaagtatgtcatcaggactcaggaaaatgggcaaagactcagtagatcgtgtaccctggggtatcatttggctttggtttttgagacagagtctcactctgtcacccaggctggagtgcagtggcatgatctaggctcactgcaacctctgcctcccaggttcaagcaattctcctgcctcagcctctcaagtagctgacattacaggcacctaccaccatgccccgttaatttttattttattttattttattttgatatggattcttactctgttgcccaagctggagtgcagtggtgtgatcttgcttcactgcaacctccgccacccaggttcaagtgattctcctgcctcagcctcccaagtagctaggattacaggagtgtgcctccagagcagctaattttttttttttttttggagacagtcttgctctgtcgcccaggctggagtgcagtggagcgatctccgcttgctgcaacctccgcctcctgggttcacgccattctcctgcctcagcctcccgattagctgggactacaggcgcccgcgaccacgcccagctaagtttttttgtatttttttagtagagatggggtttcaccgtgttagccaggatggtctcgatctcctgaccttgtgatccacccgccttagcctcccaaagtgctgggattacaggcgtgagccaccgcgcccggccatttttttgtatttatttttagtagagacggagtttcactatgtatttttagtagagatggcatttcttcatgttggccaggctggtctcaaactcttttttttttttttttttttttgagatggagtctcgctcttttgcccaggccggactgcagtggcgctatctcggctcactgcaagctccacctcccgggttcacgccattctcctgcctcagcctcccgagtagctgggactacaggggcccaccaccgtgcctggctaatattttttgtatttttagtagagacggggtgactgtgttagccaggatgatcttgatctcctgacctcgtgatccgcccgcctcggcctcccaaagtgctgggattacaagcgtgagccacctcgcctggccagtcttgaactcttgaccttaggtgatctgcccatctcagcctccctaagtgctaggattacaggcgtgagccaccggacctggcctgtttttgcttttgagacacagttttgctctgtcacctaggctgtagtgcagtggcacaatcatagctcactgtagccttgaactcctgggctcaaacgatcttcccacctcagcctcctgagtcgctgggactacaggtgtgtgccaccacgcacagctaattttcatatttttatggtagagacggggtttcaccatgttggccaggttggtctggaactcctgacctcaagtggcccacccccttgccttccaaagtgctgggattacaggcatgagccaccgtgtccggccgttggtcttaaactcttgagctcaaatgattctcctacttcagcctcctgaggattacaggtgtgcatcaccatacctggcttggctttttttttttttttttttttgagatggagtctcgctctgtcgcccaggctggagtgcaggggtgcaatctcggctcactgcaagctccacctcccgggttcacgccattctcctgcctcagcctcccgagtagctgggactacaggcgcccaccaccacacccggctaatttttgtttttgtatttttagtagagacgggatttcaccgtgttaaccaggctggtcttgaactcctgacctcaggtgatctgcctgcctcggcctcccaaagtgctgggattacaggcctgagccaccgcgcctggcctctgagttttctgtttgtttcttttttttttttttttgagatggagtctcgctctgtcgcccaggctggagtgcagtggcacgatcttgcctcactgcaagctctgccatccaggttcatgcgattctcctgcctcagcctccgagtagctgggactacaggtgcccaccaccatatccagctaattttttgtatttttagtagagacggggtttcaccatgttagctaggatggtctcgatctcctgacctcgtgatccgcctgcctcagcctcccaaagtgctgggattacaggcgtgagccaacgcgcccggcctcttttgtttcttttttttttttgagacagagtctcactctgtcgtcaggctggatacagtggcgtgatctcggctcactgcaacctctgtctccgggttcaaatgattcttctgcctcagcctcagcctcctgagtagctgggactacaggcacgcacaaccacacccggctaatttttgtatttttagtagagatgggatgtctgagtttattttttaagagacagggtcttgctctgtcacctatggtggagtgcagaggtgccactgtaacctcaaattcctgggctcatgtgattctcctgcctcagcctcccaaagcactgagattatacgcacgagccaactcacccatcttgttttttaaaatgaaatcattttctaaaatggcaaatagactaaaaaaggaaaaaataagcaatcacaatagaatgttgtggaaaaaaacaagtgacagctctgggccagcacagtggttcccacctgtaatcccagcactttgggaggccaaagcaggcggatcacctgaggtcagaagtccgagaccagcctggccaacacggtgaaaccccgtctctactaaaaacaaaaaaattagccagctgtggtggtgggcacctgtaatcccagttactgaggaggctgaggcaggaaaatcgcttgaatccaggaggcagagattgcagtgagctgagattgtgccactgtactccagcctgagcaacagagtgagactccatctccaaaaaaaaaaaaagtggaagctccgaagaaaccagcatgagttggaattttgatccgaccacttcgtaggtgtgtaacttgggcaaatctctgaaatgctccatgtcttggttttcctcctctgtaaaatgggattatattaatggccacctcaaagtaaggctacttctagggtatacagagccctggataaatatttcttgtagccaggtgtggtggctcacgcctgtaatcctggtactttgggagaccaaggcgggaagattgcttgagcccaggagtttaagaccagcctgggcaacatagcgagacctcatctctaccaagaaaagatataaaaattagccaagcatggtagctcacgcctgtagtctcagctactcaggagactgaggtgggaggatcacttgagcccaggagctggagtttgtgataagcagagatcgtgccactgaagtccagcctgggtgacagagtgagaccctgtctctaaaaaaagaaaaaaaaaaaaaaaaggccaggtgcggtggctcacacacgtaatcccagcactttgggatgccaagtcgggcggatcacttgaggtcaggagttcaagaccagcctgaccaacatggtgaaaccccatctctacaaaaaatacaaaaattatctgggcatggtgacacatgcctataatcccagctacttgggaggctgaggaatgagaatcacttgaacccgagaggcggaggttgcagtgagccgagatcatgccactatactccagcctgatgacagagtgagactctgtcccccacccccaaaaaaaaaaaaaagggggcttggcgtggtggctcaagcctgtaatcccaacactttgggaggctgaggtgggcggatcacgtgaggtaaggagttccagaccagcctggccaacatggtgaaaccctgtctctactaaaaatacaaaaattagccagcgtggtggtgcacccctgtaatcccagctacttcggaggctgaggcatgagaatcgcttgaacccaggacatggaggcttgcagtgagccgaaatcttgccactgcacttcagcctgggcgatagagccagactcagtctcaaaaacaaaaaaggactgggcggtggggggcgggcgtgggcgcagtgtctcatgcctgtaatcccagcacagttagggaggccaaggcaggcagatcacctgagctcaggggttcgagaccagcctggccaacatggtgaaaccccatctgtactaaaaatattttttaaaaattagctgggcatagtggtaggcacctgtaatcccagctacttgggaggctgaggcaggagaattgcttgaacccaggagatggaggttgcagtgagccgatacagtgccactgcatgccagcctgggtgacagagtgagactccgtctcaaaaaaaaaaaaaaaagttgtcaggcactcgtctatgtaatcagttttaatctagtaccccatgttcatacaaacacaagaaagaaacactgtatatgtttctcctactgtatagaccactttcctagaagctgcaggccctaggactaacgccagagaaccctggggcgtctgatcaaccccacatgtaacatagagggtaggaaagaatctatccctgaaggagagaaatagagatcagtgtaacatccatcccagctggtaccagccagtgggggacttagaaaatttccaggaaggaacaccaagacatgggactcccgaaggcttagggcctggggcactgccctgcttgcctaggctgaagggtagtactgcctcataggacagttgggaacagtcaatgatgcaaaggacataaatcacttagaacaggggctggcccacagcaagtgctcaataaacacttcttggcctggtgttggtatggtgcttcatacctgtaatcccaacactacgggaggccaaagccagaggattgttcaaagccaggaggttcgagaccagtctcagcaacatagcaagaccctgtctctacaaaaaaatttaaaaactaaaaaattagccatgcgtggtgctgcatacctatagtcccagctactcaggaggctgagataggaggcctccttgagcccaagagttggaggctacagtgagctatgatggcaccactgtattccagcctggggacagagcaagacctcatctcttcaaaaactttttcttttttttttgagacagagtttcgctcttattgcccaggctggagtgcaatggcgcaatctcagctcactgcaacctccgcctcccgggttcaagcgattctcctgcctcagcctcctgagtagctgggattacaagcatgagccaccatgccaggctaattttgcatttttaatagagacgtggtttctccatgttggtcaggctggtcttgaactcccgaccgcaggtgatctgcccaccttggccttccaaagtgctgggattataggcatgagccaccgcgcccaggcttttttttttttttttttgagacagagtcttgctctgtcgcccaggctggagtgcaatggtgcgatctcggctcactgcaacctccacctccccggttcaagcgattctcctgtctcagcctctcgagtagcagggactatagtcacatgccactacacccggctagttttctttttttgtatttttattagagatggggtttcaccatattggtcaggctggtctcaaactcctgacctcaggtgagccacccgcctcagcctcccaaagtgctgggattacaggcgtgagccactgggccctgccctctcttgtcaatttctatagataatttccttcactgagaaatgtgaaaacgaaaccaaaaacagtataaggacattgtgtggaccaaagaaaacatgactaaggttcagacttacagcttgcagcctgtcacgggtgtccaataaacatttgctgactgcccgaaaggctgggctaccctaggatttggctgctgttcactgcactctgccccactttgaccccagagaaaccagggagcccagagacatatgaagacctcaccttccccagctgttcaccagtctccccacatgtgtagacaaggaactcagaaccccagttgttttttaattttttttttttttgaaactgagtcttgctctgttgcgcaagctggagtgcagtggctcgatctccactcactgcaacctccacctcttggttcaagcgattctcctgcctcagcctcctgagcagctgggactacaggcgcccgccaccaggcctggctaatttttatatttttagtagagatgggttttagctatgtgggccaggctggtcttgaactccttacctcaggtgatccacctgcctcggcctcccaaagtgttgggattacaggcatgagccaccacgcccggccccagttgttttttgtttgtgtgtttgtttgtttagagacagggtgtcattatgttgcctgggctggtcttgaactcttggcctgaagcaatccccccgcctcagcccctcaaactgtggagactacaccaccatacccagcccagaacctcctttttctccagtttcctgccttgacatctcaaggggagacagtgatgagcactcgtccatccctggtccttctcctgacactgcccccagccccacttccccgctcacctccccaaaatgcatgtagatgtactcccgggcacgctggtgcaactccacacagccaatctgctcagcgaagttggcgatgccgatggcattgctggggtccagctgctgcaccaggaagtcactgcaggcacggacaacgctgtcgatctggtacatgacagcaccgttcatgacgtggaggacacacttctcgcccatggagatggaggccgtgtaggcgaattcaatgaggcgctccatgaccttggggtggataccctcaatggacaccacctccatgccctgctcccgcagcccgttggtgaacatggccttgaagacagggctggatgaggccagcaccaccttgtgggccatgaactgggcggccggtgcatcctggtacttgacctgcagtgtgacgtcacacagctgctggctgagccgcagctcgttcatgatgccaaaggcctgcttggtatgatcctccagggtgtagctgaaggtgcggttgccatgctgggagggcgtcacctccgccttgcactcagtggaggcgtacatcaccgcgtcccctgccccctcagggcactgtgactgcaggggcaggaatcggcagcaggccccagccccgctaggcctgggatctggctgcatggggttccagaagataagcaacaccaccacctctggcactcagggacctggaggggagagagcacagggcagagggcaggggttgggactgggccagcacctgccgggcctcgttttgcaagataaagcaattcctaggtcagttttcctgcaaagtaggtgaagcagaatccatttgcaaacttgcaaacttccccgacctgatcaacctgattggcccaagagcccatcttaaaacatacatgaagtcatgtctctcccctgctctggatcctccaatgcctcccacagtacctagtaaaactgaactcctcaacagcctgcaaagccctacgcaattagcccctgccacctcttccctttgatcactctgcttcagcaatctggcggcctttccctttctagagcatgttgagctcattccttcatttgcctcaccatttactgggcacctactgtatgccaggcactgatctgggtgctgaagacacagcagtgagcaaaatacaaaaatcctaccctgccagagctgacaactgcagggaggagcaatcataaactaaaataagcaagacctggaaaaacagcttcatgaagaaaattacaacagcattgtgacaacgtgagaatcgggtgcagtttgtttgcttttttttttttttttttcagatggagtctctctgtcacccaggctggagtgcaatggctcgatcttggctcactgcaacctccgcctcccgggttcaagcgatcctcctgcctcagcctcccgagtagctgggactacaggcgtccgccaccacacccggctagtttttgtatttttagcagagactgggtttcgccatgttggccaggctggtctcaaactcctgacctcaagtgagccgcccgccttggcatcccgaagtgctgggattacaggcgtaagccaccatgcctgacccggggtgcagttttttaaaatctggcagaccaagcctctttgagaaggtgaggttggagctgagacaaggatgaaaattattataaagtgggaggctggggagtagttttccaggcagaggaaacagtaagtgcagtggctcagaggctgagacagtcaatctggagaattgggaaggagtgcagtgagagctaaggacttaaggaagggtttcatggaaacccctggatcctggagggccaggagatgagttatgtgttttgtgttttgtttttcgagacagagtctcgctctgttgcccaggctggagtacagtggtgcgatcttggctcactgcaacctctgcctcccgagttcaagatattctcgaccgggcgtggtggctcacgcctgtaatcccagcactttgggaggccgaggcaggcggatcacaaggtcagaagatcgagaccatcctggctaacatggtgaaaccccatctctactaaaaatacaaaaaaattagccgggtgtggcggcgggcgcctgtagtcccagctacatgggaggctgaggcgggagaaaggcgtgaacccaggaagcagagcttgcagtgagccgagatcgcaccactgcattccagcctgggtgacagaacaagactccatctcaaataaaacaaaaaaaagatattctcatacttcggcctcctgagtagctgggattacaggcaccagccaccacgatgggctaattttttgtatttttagtagagatgggatttcaccatgttggccagggtggtctcaacctcctggcctcaagtgatccccctcctcgacctcccaaaatgctgggattacaggcataggctgctgtgcccagacgtgagttacgtttcaaaaggagtgggggatctccaagtggctccccacaagtggatctgcaagttctcactcccctctttctgggactcaactcaaagtctcctcttccctgttttattgtcatcactgcgcttgtcaggaactgaaatgacctcctttgcttgtctgttgatcgactgtctctcgtccccggccccagcgcctcaaatggcagggagacctatgtaggtcggcgtcgggccaaccctctcctgtgcctctcgcctggggcctggcactgcgcaggggtcaataaacgggtggttggctaactgccctgccaccgtgcctgccagagcggcctcctccaccctccctgggtgccactcggcccccactctggtgccaaggccctgggtttgcctcttggtctttggccaatcggtcaacaatgccccttgggcaccgggcacttcccccaccctacaaagcggcaagtgggcgactgcgcatgcccctcctgagcctccaccaggcccagtgaggcgaggaagtgaccccaccgcggcctctcggctgccaaccccagaacgcagatcgagcccctcaacgcctcggagcccccgggcctccttctgcgcagcgcctcctggttctctcgctcggtttccgccgctcccgggccaccccaagagttgcgccgtccaacaaaaatatccacccaggtcgcgccctcctggccctccgagtcctggcggggaactcggaggcgccctgggccgtggcgcccgttttcctggtctccgggcacggccgcaggggcgctcgcggcccgcgatgcccgcagcccgggcacatcccgcctcactcaccccgccatggccgcgctccggctccgcctccaccgcccgagccccggcgcctccatcgctgcgcgtgggggaggcgcggagcgcgcgcaggtcaccatgactaagcagagccgggcgcccgccgtgtcacaataaaagtccccgggccctggcctcaggcggtagggaccgctgaggggccgctccccacccccgcccacgcctgctgtcgcccagctgcgcggccaccacggcgcccagcatggcggcggggcgggggcacgcgaccctgagcgcgcttagccgcgtggtccgagtcgcggggagtctgaaccccgagttccaggcctgcgcgccccggcccgcaccaggggtggggtggacacccctccccgtcgctgctgcccaagcgctcacctcagcccccaggtcgcctccgtagggggtccctcggggtggggatggccggggcgcgcaggggctccgggcacagtgatgccacccgcgcactgcgcttccgggaagccgggggaccgcgacccagtccaggagattcctgccttaccttggctgtaggggacccgcgggcgcctccgccgtcggggggcctcggctccagggctgcgtggcctgcggggtcttggttgtcggttggggagcggcctcgggacgcccgaaaaggaggcggggagagggcggaaagggcgcggcgggaaaggagcggcgattctcccgcccttcccgcaggtgcccggcgcccgtcggcgaggagtggggcatcgggcgggggcgcacagccaggccccccttctcactgtcccttccatctcccgatttcgttgctggatgtctcctcgcggggctgcgcgccaccatctgctattctccttttaacaacgcacagcgccggcctcgtggtccggcggccgcaggatctagggaaaattatctacctcgctaggttttcttttcttttcttttctttctttctttctttttttttttcctttagagacaaggtctcgctctgatctgcacgcccaggctggagtgcagtggcgcaatcgcggctcactgcagccttgagctcctggcctcaagcgatcctcccacctcagcctcctgagtagctgggaccacagacaggcgccaccacacccggctaatttttagtttttgtttgtttgtttgtttttctgtagagatggggtctcgcaatgttgcccaggctggtcttgaacacctgggtttaagagatcctgactccattggcctcccaaagttctgggattataggtgtgaggcgctgtgcccaggcctcaggttttccttgtcttttttttttttttttttttttaattgagacagagtctctcactgtcacctgggctggagtgcagtagctcgatcttggctcactgcaacctccgcctcccgggttcaaaaaattctgcctcagcctcccgagtagctgggattacaggcgcccgccatcatacccagctaattttttgtatttttagtacagatggggtttcaccatgttggccaggatggtctcaaacccctgacctcatgatccgcccgcctcggcctcccaaagtgttgggattacaggcgtgagccaccgcgcccggccttccttgtctttatttttgatttacttcctatcaagaggcgtgtggcacccgtctttggggggttcaaaccctggatctgcctcttaccagctcagtgcccgtgggcgcttacttagttctctatggttcagtttcctctctataaaaagtaataatataatagcacctacctaccagattatcattaagactaaatgcggggccgggcgcggtgactcacacctgtaatcccagcattttgggaggccgaggcaggcggatcacgaggtcgggagatcgagaccatcctggctaacatgataaaaccccgtctctactaaaaatacaaaaaattagccgggcgtggtggcgggcgcctgtagtcccaggtacacaggaggctgaggcaggagaatggcgtgaacccgggaggcggagcgtgcagtgagccaagatcaccgcactgcactccagcctgcgccacagagcgaggctctgactcaaaaaaataaataagtaaataaaaaataaaaatattaaatgcgaatgctggctcccaagagacagaaaccattgctatttttcatgactggggatactgatttgtcatgcacaccgtttatcatgtaacgttaacttttaaataaatgtatgtaagtttattttaaagaattcatctaggctgggtgcggtggctcacatctgtaatcccagcactttgggagccgaggtgggtggatcacgagatcaggagttcaagaccagcctggccaacatggtgaaacccccatctctactaaaaatacaaaaattaaccgggcgtggtggcgggcgcctgtaatccccagctactcgggaggctgaggcagagaattgcttgaacccgggaggcagaggttgcagtgagcagagatcgcgccaccacactccagcctgtgcaacagagtgagactctgtctcaaaaaaaaaaaaaaaaaaagaaaaaaaaagaattcatctaaatttcatccaaattataattatttttaaaagatagagaggccaggcgcagtggctcatgcttgtaatcctagcactttggtaggccaagacgggtggatcacctgaggttaggagttcgagaccggcctgaccaatatggtgagaccgccgtctctactaaatacaaaaaattaaccgggtgtggtggtgggtaagtgaaggttgcagtgagccgaaatcctgccattgcactccagcctgagcaacagcgcgagactacgtctcgaaaggaaaagaaaaaaaaaaaagatagatgggatttcgccatgtaagtgaataataaatggaaactctaggcccctggagcctccagggtgaatttgaaagattgaacgtcctggctcagggtctggaaggaatcacgtgtagggctacgttggagttaccccgctaccccaaatccttgttgcgtgtagatgcagttccagacagctcctcaggggggcggcctagatagtccgtgaacacgctgagtggccgaggttgtaaccagcgccttcctggcacgttgcagaaaacaacctctctaatatctctcaaaatcaaacctacaggtccagtgagccaggtgcttgtagagatttatccaaggtgcactcgcacacatacaggaggaagcatgtgcacacattcattgcattataatgcatatcatggcaaaaggactggatcccattcacatgtccctctgtagagccctggcttaatcagtggtggcacatccttgctaagaaatactatgcagccagttaaaaggagcagtacatttactgtatggatatgtacctagatcttctattttttcttttctctttttctttttcgattttcatttatttatttatttatttatttatttatttttgagacggagtctcgcactgtcacccgggttggtgtgcagtggtgtgatcttggcttgctgcaacctctgcatcccgggttcaagcgattcttctacctcagcctcccaagtagctaggattacaggtgcctgccaccatacccagctaattttttgtatttttagtacagacagcgtttcatcatgttggtcaggctggtcttgaactcctgacctcgtgatcctcccgcctcgtcttcccaaagtgctgggattaccgacgtgagccactgcacccagactctttttttattttatttatttatttttctttttttgagacaaggtcttgctctgtcacccaggctggagtgcggtggcacaatcatagctcacttcagccttgacctcctgagatcaagtgatcctgctgccccagcctcccaagtagctgggactacagtcactcactaccacacccagctaacttccccccaccctttttttctttcttttgtagagctggggcttcaccatgttgcccaggctgatctcgaactcctgggctcgacggatcctccctacttggtctcccagagttctgggattacaggtgtaagccaccacgccccacctctttttttttttttttttttttaacagggtcttgctgtcacccaggatggcgtgcagcagtgcaatcatggctcactgcagcctcgaactcctggctcaagccatcctcctgcctcagcctcccaagtagctgggaccacaggtgtatgccaccacacttggctaagttatttcttttttgtagagatggtgtctcactatgttgcccaggttggtctcaaactcctgggctcaagtgatcctcctgcttcagccctgcaaagtgctgagattacaggcataagtcactgtacctgaccaggcctctatttttttaatgtaaaaaaagagccaggcccagtggcttacgcctgtcatcccagcactttggggggccgaggcgggcagatcacctgaggtcaggtgttcgagaccagcctgaccaacacagtgaaacctcgtctctactaaaaatacaaaataagccaggtgtagtggcgcatacctgtaatcccagctactcaggaggctgaggcaggagaatcacttgaaccccggaggtggaggttgtggtgagctgagatcgtgccactgcactccagcctgtgcaacaagagcaaaactgcatctcaaaaaaagaagtgctatggaccaaattatgcacccgtacccccttttcgtgtgttgcagccctaaccctcaatggaatggtatttggagatggggcctttgggaagcgattaggtctagatgaggtcatgaaggtgggaacctcatgatgggattagtgtctttataggaagagcacaccagaaagtgttctctctttcttttttcttttcttttttttttttttttttttttttgagacaggctggaatgcagtggtgccatctccactcactacaacctccgccttacaggttcaagcaattctcctgcctcagcctcctgagtagctggagttacagatgtgtgccaccacacccagctgatttttgtatttttagtagagatggggtttcaccatgttggccaggctgatcttgaactcctggcctcagttgatccacctgcctcagtctcccaaagtgttgggattatagtcatgagctacctcgcccgacctgctctctgtttctttccccaacatgtgggaacacagtgagaaagcggctgtctgcaagctcagaagagagtcctcactagaacacaaccatgctgacattctctttttttgagaccatgtctcgccctgtcgcccaggctggagtgcagtggagtgatctccgctcactgcaacccctgactcctgggttcaagcgattcttctgccccagcctccggagtagctgggattacatgcgcatgccgccacacccaggtaattttttgtatctttagtagcaacggggtttcaccatgttggccatgctggtctcagattcctgacctcgtgatccacctgcttcggcctcagtgctgagattacaggcgcgagccactgctcctggcctttttttttttttttttttttttttttttccgagacagagtctcgctctgtaatccaggctgaagtgcaatgtcgcgatctcagctcactgcaacctccaccttctgagttcaagcagttctcctgccttagcctccccagtagctgggattacaggcacctgccaccacgcctagctaattttttttttgtatttttggtagagacagctgtttcaccgtgttggccaggctgttctcgaactcctgatctcaggtgatccgcctgcctgggcctcccaaagtgctgggattacaggcgtgagccacagtgtccggccccaggctgccattctgatattggacttcctaccctccagaacgatgcaaaagtaattactgggacttaagccaccccatctagggtatttgttatgcagtccaagctgactaagagcaagacattacaaaatgtgtgggtattgccaggcgctgtggctcatgtctgtaatcccagcacttgggaggccgaggcaggtgaatcacttgagctcaggagtttgagaccagcctcaaaaaaaaaaaaattagctgtgtgtggttgtgagctgtgttgtggttttgagctctgtggttgtgagccaggtgtggtgtggggatatttggtcccagctactacacgggaggctgaggcaggagtagtattgcttgagcctgagaggtggaggctgcagtgggccataattgtgtcaaatgcactccagcctgggcaacacagcaagaccctatctcaaaaaccaaacaaacaagaaaatgtgtgggtgtgcaatatttttgcaagatatacttttcaaaaaaattttttagacaggtcttgctgtatcacccaggctggagtgcaattgtacaatcatagctcactgcagccttgacctcccaggctcaggcgatcctcccactccagcctccccagtgtctgggaccataggcatgtgccactgtgcccgggtgattttttttttttttttagatagtgtctcactctgttactcagattggagtgcagtggcatgatctcggctccctgcaacctctacttcctgggttcaagcaattctcatgcctcagcctcctgagtagctgggattacaggaacctgccacaacgcctggctattttttgcatttttagtagagacggggtttcaccatgttggctaggcttgtatctaactcctggcctcaagtaatcctcccgccttggcctcccaaagtgctgggattacaggcatgagccaccatgcccggcccacctgggtgatttttgaatcatttctagaaactgggtctccctatgttgtgtgggcctatctccaactactgggctcaaatgatccttctgcctcagcctcccaaaatgctaggattacaggcgtgagccaacatgccctgccaagatatactgttaagtcaacaaagcaacatgcagaacagtgataaatttgtacaaaaagacaggaggtgtatttacatttcattttggcaaggtgaatccacagactagctctggaaggtccccaggagtcccactgtgatcgccacaaggaaggggaactgcgtgcttttttttttttcttgagatggagtttcattctttttgccgaggctgaagagcaatggcatgagctcggctcactgcaacctctgcctcttgggttcacgtgattctcctgccttggcctcccaagtagctgggattacgggtgcacgccaccatgcccggctaattttgtattttaagtagagacggggtttccccatgatggccagactggtctcaaactcctgacctcaggtgatccgcccgcctcggcctcccaaagtgctgggattacaggtatgagtccactgcgcctggctgaactggatgctttttaaattttctagaaaactcataagcaagtgtgcctgtgttccaactggttggtttcccgtgtgtgtggcctccaggggcactctgaacgtggccagcagggacttggggtccccccagtctgggacacctgtccccaaaacaccgctttttttgaggttgcctgcagttccaaggtttcccggaaggtggagcgctgcagtctgaacccgaagccagacgccccccaacccggccccagggcccatccagccgttcaggggtcaagaatgcgcctggggacatgccgggggcaggggccagcacgtctggagccttttatgggcacaaacggcgccctggcatcgttccaaccatgaatgcagacccccgtgggagggactgttggcatagccttgccagacccatctggaggggtcagataccaagccagtgcctcctggggcctgaagcttaagctaatgtcctggctcagacactgagacaaggtagtcactgtctggaatttcctcatctgtctaatggggattaggaaacctaccttgcaaagttgctataaggctgaaaaataggtgtgtcccagaactgtgcagaaaactagccagacaaaatgaactcttactttaggccgggtgtggaggctcacacctgtatcccagcacttcgttgttgttgttgttgttgttattgttattttgttttctgagatggagtcttgctcggtcgcccaggctggagtgcagtggcgcgatctcaacttactgcaacctccagcctcctgggttcaagtgattctccctcctcagcctcccgagtagctcggactacaggcgcgcggcaccatgcccggctaatttttttttttttttttgtatttttattagaggcggagtttcaccatgttggccaggctggtctcgagctcctgacctctagagatccgcctgcctcggcttcccaaagtgctgggattacaggtgtgagtcaccgtgcctggcctttatcccagcactttgggaggccaaggtgggttgcttgagcccaggagtttgagaccagcctgggcaacgtggtgagaaatcatctctaaaaaaaaattcaaaacatgtttggtgtggtgctccagtagccccagctactcgggttgggggctgaggcaagaggatcacttgagcacaggagttcaggaggatcacttgaggctgcagtgagctgggattatgccagtgtactccaggctgggcgacagagcaagatcctatctcaaaaagaaaccaaaaaacggccgggcacagtggctctacctgtaatcccagcactttgggaggctgaggcgggcagatcacgaggtcaggagtttaagaccagcctgatcaatatgtgaaaccccatctctactaaaaatacaaaaactagccaggtgtggtggcggtgcctgtaatcccagctactcgggaggctgaggcaggagaatcgcctgaacccaggaggcggaggttgtagtgagccaagattgcagcactgcactccagcctggtgacggagtgagacttcatctcaaaaaaaaaaaaaaggccaggcgcagtggctcacacctgttatcccagcactttgggaggccgaggtgggcggatcacaaggtcaggagatcaagaccatcctggctaacactgtgaaaccccatctctactaaaaatacaaaaaaattagccatgcttggtggcgggcacctgtagtcccagctacttgggaagctgaggcaggagaatggcgtgaacctgggaggtggagcttacagtgagccgagattgcgccactgcactccagcctgggtgatagagtgagcctccatctcaaaaaaaaaaaaaaaagagaaaccaaaaaacctcttatgttttcctaaaagacatgatttcatcacacaggctggagttcagttatgcaaaaatagctcactgcagcccctgagctcctgggttctggaaatcctccttcttcagcctccccagtagctgtgactataggcatgcgtaaccacaactgcctaatttttaaaattttttgtagagatggggtctcactatgttgaccaggctggtctcaaactcccagcctcaatcgatccttctgcctcagcctcccaaagtgttgggattacaggcatgagccactgtgtctggccttattttgttatccttttttttttttttttttttttagaccgagtctcactttgttacccaggctggagtgcagctctttgcaacctccgcctcccagtttcaagggattctcctgcctcagcctcccgagtagctggaactatatgcgtaagccatcacacttggctaattttggtatttttagtagagatggggtttcaccatgttggccaaactggtctcaaactcctgacatcaggtgatctgcccacctctgcctcccaaagtgctggggttagaggcatgagtcacggcacccagcctattattattatttcttttaatgaaggatctgaaactgcatttgaagaaattttattaactgggcatggtggtgcatgcctgtagtcccagctactagggaggctgaagcaggaactccaggcttgatcccaggagttccaggctgcagtgagctataattgtgcccattgcactccagcctgggtgacagagcacaagatcccaactcaaaaaaaaaaaaaagaaagaaagaaagaaaagaaaaataaaaaagaaattttattaccagataggatttggctgagtctcccagagtcaaatttgggggtgccccacccttggcattgtccttgataactttattccactcttacactcaattcctcagtaattctgtctgctgcctctaaaatctatctagaatccacggggtctgggcttagctggaatctccatcattgttcctgtggctcagtgcagccccccttcaccttctctggttttcaacctcccatggaggccacaagacacctgtgatcacctgaattagggcaagtccctcttctgcttagaagcttctatggctcccacctcactcagagcaaaagcgaagtcctctatatcacccacaaggtccttcgggaactactccttcagctccttgtctcctcccattctccccctccgtccctgctccaggcacaccagcatcgctgcatttcttagaacacatgggcacatttcagcctcagggcctttgcgcatgccattccctcatcctgaaatgcttttcttttggtcttcccaggacagaggtctcagctcacatcacaagtcactacctctgcagagaggtcttccctgaccaccatcaccatctctgtcgtttgtcactggaatcatctccattatttcatcaccgagttcttttctgtgttcccaagcagaacgtcaattccacgagggcacagattttttgtctgtttgttcacattgtggggtgtcgctgcataaatacatttcccctgcatcttttccgactgcacctttggctgcatttcctacaaattcctttatgtaaaaagaacaagtctgtaaaacttgggaagacagtcgtgggccgagggtgtcagtctgcagccggttctgataccagagtccgggcggctgtgggtgcaccggggctgcctgtggagccgctggtgtccagcccgtcgcgctggggcgatgagcgctccgagccgctgaagctcccatcaaggcccgggggcaggcagcggcgcaggcccccggaagcctcagccgcgctcgccgactgctgggagccactcgggtctctgccgcaggagtggcgtccgcagcagaccaggcgcaggagcgcgtggcgcaggtcgcggttggtgagcgtgtagatgatggggttcagaagtgagttggccatggccagtcccaggaagggatcggcctgcaggagtacaggacaggtgcgcgccgggcacgccacgtcgagcaacagcagcaggaagagggggccccaacatgccacaaaggccaggagcaccacgctgagcgtgcgcagcaaggccagcgagcgcggcttgcgacgcgcccgggtcgaggtggtccccgcagtcccgggccgtgccggcaggcgccgcgcgttggcgcgtacctggcagtagatgcgcgcgtagagtgcacagatagcggccaggatgcccacgaaggcgagcacgcagaagagcacgtaggccttggcgtagagcggcaagacagtggagcaagcgtccaggcgacccaggcaattccagcccagcgctggcaggagcccgaggagcagcgacacgccccaggccgcggctgccatcgccagcgtgcgcccccgactggagacgggcgcgggccccctgcgcgccatggtgaggctgcgctccagcgcgatggccaggaggctcagcacggacgcagtgagtgccacgaagacgcctccctcccgtgcgaaccagagcgcgggggacagtttcagcgtgagcggccccgacagtaggatgttggcggcgtaggcggcgcctgccagcagatccgacaacgtgaggctgcccaggagcaggaacatgggagcgtggaagcgcgggtggcgtccgagcaccaacaacacggctagattctctagcacgatgaaggcgcacaccgccaggcacaccacggcgtcggcgcgcaggccggcacccggctggtagcgcgcaccgcggagcttgccggtgtagttgtaatgcaggacgatgacctcgctcaccggcgccggccgcagcagccccgactccatgggccgcgcgccccaaggctgttggagaggcaagatacggtgtcaggccgcggtccccgtaagcacgctcgcagcagccggctaagtcgtgggaaaggggccctacccactgaccatcaccccctatacatggtgtccaagggggagttcaggatggagggatagagtccgtggagacagacatacacacaaataatatcacgagggaacaaggtgacatagtcccaaaaaaagggacattaataacacatgaatggctgggcgcggtggttcacacatggctgggcgcggtggctcaggcctgtaatccccgcctgtaatccccccaggctcaggcctgaggcagtggctcaggcctgggaggccaaggggggcagatcacgaggtcaggagatcgagaccatcctggctaacacggtgaacccctccgtctctgctaaaaacacaaaaaattagccaggcatggtggcacgtgcctgtagtcccagctactccagaggctgaggcagaagaatcatttgaacccaggaggcggaggttgcagtgagccgagatcgcatcactgcactccaacctaggtggcagagcgagactctgtctcaaaacaccccccctccccaccaaacacacacacggctgggtgtggtggctcactcctgtaattccagcactttgggaggctgaggcgggaggattgtttgaggcccaggagttcgagattagcctggacaacataggagaaccccgtttctacaaaaattagccgggacgtgttggtgtatgcctatagtccaagctactcagtggagtcccagctgaggtgagaggatcacttgagcccgcggggtcaaggctgcagtcagtgagcattgattgtgccactgtactccagccaggacaacagagcaagactttgtctcaaacacacacacacaaacacacaagcagggagttccagagacgtaacagtaaacacacagaacgcacacaaacgcaacacacacagaaagagacacacaaatacagcgacacactacaagggcaaaacacacagtcacacactatcagggaaactaaaaaatacatcatacaggaacagagtgacgcaggcagaaaaacacagcgaccaaaattcagtcacacgaatacagggtctcccacccagtggcacaggccacaatttcacaacctccactcacactagcctggggcccagtgcaccacactccacactcttgtctcactgcatacaaagctttttcctgccaaaaccccctcatccacccaaaaccccatgagaaagttgctccttggccaggcacagtggctttcgcctgtaatcccagcactttgggaggccgaggtgggagtatcacttgagcccaggagttcgacaccagcttgggcaacatactaagacttcatctctacaaaaaaatttaaaaattagccaggtgtggtgttatgcccctatagtcccagctactcaagagactgaggcgggaggatcacttgagcctgggaggccgaggctgcagtgagccatgatcgcacccctgctctccagcctgggtgacaagagagaaactccgtctcaaaaaaaaaaaaaaaaaaaaaagttgatcctattcactcattttactaaggcagagcctgaggacaggagagagaatccacaagaggcaaacagactcttacagaggggcacacatgtcattaaactgtaataacactcctcacctgcctctgtgaccttattaatccccacttcctttagtcctaatttacagatgagaaaactgaagctcaaaagaaatgcttcgtatcgaagcaggcgcaaaggtttccatgctcccacacaaacatccatgcacaaatagtccccatgcaagtccagatgagaaagccaaggcctggggaggggaatggatctcttttgcacaaggcagggatgcggacatcccagagagcttcagtcacacacagagaatcaaggcaggcaaacatagacaggaagtcgctggctcacccatgctggaggtggggagcccaaatacagggagacagggttacacatgctctgagggggaggccaaccccatccgcccagcttgcccggcagcaggactgaagtatggaaacttgcagtggcccggccaggagggggtggccaggggattccagccaccttcaccccgtatcccaggtcctgcacccagctggggagcccccagcttccccctccccagaggcctccaggaaaagttcggagaactccctgcaaggagtggtgcgcctttttagaccgggaaagtggccgccagggcgaccccctccgggtcaggcccagcccagcgcccccaaaggtccagtgcagtccactcactctgcgccctggtcgtgcgccacccgcagtcgcgctgccttgaaccgagtgagcggacgccgctccgggggcggggctggagctggcaggcgagggggcgggccagcgacgcaaagggccggcggtcgccagcagttgccccctccccttgggtcccgggcactcagcccatggctgccagcctgtgccactcgccgcggcaccggagcgcgccccggcggcgactggcacaggcgagccctcagctgccccctccgggcctgggctgtcctcccagggacgctccatcgcggtgggaggactcggagaggcgggaaagggagggttctgcagcagggcggtcgcagcctgagcctcttctccccagcggaggggtctcctctgtcctgggtgtccgggcactgcgccctcccattgcccacccacctgtgaactgagcttcctgggctgcaccccaaggacgccccgtcgatgattcggaggggtcttcagtgggttgcttagcaggagtcttcagtgggggccaccttagcctgagtcctctcccaccagcagataggttcccgctgctcccgggcacaggcccctcccaatttcccgctcccgcccccggctcagggcgagtgggggtggggcgggcccgggcaggattgtgatgggaacttgccgctcctcagataaggagggtctctcctgtcccaccccctggattccgtgttcccccgaccgattctctcccacccttatcgctgacgacaaagtgatttactcattaatggtgtttctgggctgtgtccttagcagacagtaaaccccagcaatgtaagaatttcttttttttttttttttttgagacaagatcttgctctgtggcccagagtggagtgcagtggcaacatcataagtcactgcagtctcgacctccgcggctcaagccatcctcccatctcagccggctgaacgtagctgctgggactccagtcgcttgcaaccatgcccagataatgaatgagtgtctccctcacttcctctgtatctctctcaggaggatctcagagtctctcgcctgcgtgtctctttgtctctgcgtgtctctttgcctctgcgtgtctctttgttgctgtctgtgatgctctcccacgcctctcccaggccactgctcctccaacgaccagtcccgctggccccgaaacgcccccaccccgacttcccaggaacttccagacggtcccagctcttccaccctcagattcaggaagggaggctgggtcccgctgctgcgaccttctccaggaccgtgccctttgcccctgatgcttcaggccctgctggccgcgggtggggtgagggcgccccaggagagatgagccagaggctgagaataagtgtggatccgggataccctcgtgggaggaaactcagggggcactcaggccgggtcaggcccccatgtagccccttggggatcccagccctcctgcccccgctgttccctcggtgggcagaacctttcctgcctgctctgctcaaagacacagccaatgggacccgcagggtgggacggtgttaacccttcagtgccaggttccccagtcctgtggaccaagccaactccaatggtgcccactgggatgacccctgaagatctcccagcatggctgtggctggcacccagtaggtgctcaataaatgacctccttctgtaaaggggaagccgcgccccagggtggggaggtggctgcttcacacctcccaggcgccaatctcacttctctcgaaaatggggctcttccggctgcgggtcccgggctcagcaacctgcctctccagctgcctccctgaacttctttcccacgaattgggaccctggggactcaggctccaggatctcgacagatgttgggagtcccatccctagctgccactccacactcctggccacagttcttaaaactcagatcacatttcttttctgctccaaaccctcccgtggctccctgtgtttctcagagtaagtgatcaagtcctcagtgaggaccccgcaaggacaaggccatatgccgtcctgatttgtctctttctgttacttctgtgcctctctctgctccactctgcttctgcctcccgggctcctccgagttccacacacacttcaagacttttgaacttgggggccaggtggcctggagcacccttctccccaccccttcccagctggtcagctggtcacctcctcagagagaccttccctgatctgtccctcatctcaaatggcagttggcattatctgaaatcaccttgcttttgctttttttttttttttgtaatctccctttattgcccaggctggagtgcagtggtgcgatttgggctcactgcaaacttcgcctctgcaacctccgcctcctggcttcaagcaattctcctgcctcagcctccagagtagctgggattacaggaatgcaccaccccgcccagctaatttttgtatttttagtagaggcggggtttcaccatgttggccaggctggtctccaactcctgacttcagatgaatcgcccgcctccccctcccaaagtgctgggattacaggcgtgagccaccgtgcccggccaccttgttcatttcatttatttattcatctttcctaatgtgtatctctgacctagagcctcagctccaggaaggcaggtctgtccctctgcccagattcctaaaggttaagggctcacagttttttgatttttctttcttttgtgagacagcgcctcactctgtcatccaggctggggcacagtgccgtgatcacagctccctgcagcctcgactttccaggcttcaagcaatcctctgcccaacctccagagtagctgggaccgtaggtgccagccactgcacctggctactttttaaaattttttgtagagacagggtctcgccaggttacctaagctggccttgaactcctggactcaagcaattcttctgcctcagcctcccaaagtgctgggattacaggagtgagacaggactcaaggtcttgaggcaggcaagtgatacccactgtgagcctcagtggacttatctgtaaaattgagataatagccaggtgcagtggctcatgcctgtaatcccagcactttgagaggccgaggtgggcagatcacctgaagtcaggagttcaagaccagactggccaacatggtgaaaccccatctccactaaaaatataaaacttagccgggcgtggtggcgcgcacctgtagtcccagctactccggaggctgaggcaggagaatcacctgaacctggcaggcggaagttgtagtgagtcaagatcgcgccactacactccagcctgagcaatgcagtgagactccatctcaaaaaaaaaataaaaataaaattgagataaccgcacccactccaaggctgttgttgaagatgaaatgaacagttggaacagagccaaggtatacaatgagagctccacaaatgtcagtgcagctattattggtcaccactgtatccccaaagaagaattagggcaatgggctcataaggaatcagccccagacattgccaccacccgcccccaccccatacctcctcccacaccccacaggccaaactgtctcttcccgggttcagggcacccctggcctctatgttcctgctgtgtcttgcagcagccctcccgcctgaagcatgcctaggccagcacacccgctgggccagttctgctgccagcaccctcgcccacagaggcagctccacccagcgcccgctcttgcagagctgggtctgcaccttcgagagggcaaactgcctcccatggtaccctcagatccccttcacccactcccattcccaccctcctcactccccctgccctttttttttttttttttttttttgagacggagtcttactctgtcacctgggctggagtgcaatggcactatctgggctcactgcaacctccacctcctgggttcaagcaattctcctgcctcagcctcctgagtagttgggattacaggcacgcgccaccacacccggataatttttgtatttttagtagagacatggtttcaccatatgggtcaggcttgtctcgaactcctgaccttgtgttccacctgccttggcctcacaaagtgctaggattataggcgtgagccaccctgcccggtctttttttttttttttttcttgagatagggtctggctctgccacccaggctggagtgcagtgcgcagtgatcttggctcagtgcaacctccaccccgagttcaagggatcctgccactacagcctcccaagtagcatgcgccaccatgcccagctactttttttgtatttttgtagagacagagtttcgccatgttgcccagactggtctcaaactactgggctcaagtgatcctgctgcctcgacctcccaaagggctgggattacaggcatgagccactgcacccggcccacattccctttttcacagccctgaaacttaaatgtggctgcagggaggtgtgaactgacaactttcccacagccagagaacagagaggcagggtttgggggtctcaaacgggaggcccgagggccaactccaactcacatgcacaaggcttgtttgtgcagctcagtgaggtttcacactcaaacagctatccgaactggacagaaatgctgcactctagccagtaaatttgtttctcttagaagtacaaggcaacaggctgggcgcagtggctcacacctctaatcccagcactttaggaggccgaggggggtggatcacctgagatcaggagttcgagacaagcctgactaacatggtgaaatcccaatctctactaaaaatacaaaaattagccgggcatggtggtgcacgcctgtaatcccagctactccgaagactgaggcaggagaattgcttgaaccggggaggcagaggttgcagtgagccgagatcgcgccactgcactccagcctgggtgacagagcgagactccgtctcaaaaaacaaaaagaaaaagaagtacaaggcaacaattctgaaaatgctttcatgctaacattgaacaaataagtacacgtgttgtagatatgaataaccaggtttcatactgttggggaaaaaaaatgacaaataagccaggtactgctgcattgaggttatcagtatgagctcaagtttattttaataaatggataagaaaataaatatagatatgtgaccaggtgctgtggctcacacccataatctcagcactttgggaggccaaggcgggtggatcatgaggtcaggagatcgagaccatcctggccaacatggtgaaatgccatctctactaaaaatacaaaaattagctgggcttggtggcacgtgcctgtaatcccagctactcggaagctgaggcaggagaatcgtttgaaccagggagtcagaggttgcagtgagccgagatcatgccactgtactccagcctggcaacagagcgagactctgtctcaaaaaaaaaaaaaaaagctggacgctatggctcacgcccacaattccagcactttgggaggtcaaggtgggtggatcacgaggtcaggagttcgagacaagcctgaccaacaaggtgaaaccccgtctctactaaaaatagaaaaaaattagccaggcatgggggtgcatgcctgtaatcccagctactcaggaggttgaggcaggagaatcgcttgaacctaggaggcagaggttgcagtaagctgagatcatgccactgactccagcctgggcaacagggtaagactccgtctcaaaaaaaaaaaaatttttttttaattagaatgtggtgaaggttgcaccactctgtaaaatacactaaaaaccacagttgtatatttcaagtgtgtgaatttgatgacatctgaattatacctcaataaagctgttaaaaattatatttgacatttatcaagtggttagttcaaagcggggcaatgtgctgaactttctacaccatgttacattcccacccagaacatcatgtgagaaggaaagggacttttatgtctccactttataggtgtcccagattgagatctgagaggttaagcaagctgtccacagtcacacagaaatggggtgaacaaactacagaggtctggcattggaggcctggcaaccctgggcttcccctccggtcccctgctccttacttgttctaagctgagctcatggcatactgcaatgattttagtttctgccacacacacattctttccagcctccaggtacctggatttgctggttcaatccttctgcctggctgttttcccttttctttttctttttttttttttttttttgagggagtttcgctcttgcccagactggagtggtgcaatggcgcaatcttggctcaccgcaacctccctctgcctcccaggttcaagcaattctcctgcctcagcctcccaagtagctgggattacaggcgcgtgccatcatgcctggctaaattttgtatttttagtaaaggcagggttccaccatgttggtcaggctcctctcgaactcctgacctcaggtgatccaccagcctcagcctcccaaagtgctgggattacaggcgtgagccaccacacctggcctgtttccccttttctttccacatagcctgtgaaatgaatgtctaagtgtgagggcacgagagacagatgtagagagagacagagatagaggaaaggtgccgagtccagagctccacatctcggcctgggaggtgaggggtgccaggggcacctggaagggttgcttggagggaactatccaggaaatgcttggccaccgacctccatctatagcgtttaaagccatctctcttccttggcctggagtttaagccaagctataattcaggacactcctaagaggatgaggtcagattttccccaggagaattcaccaggcctgggggtgagcaggtggcaggagagaggcatggccctgccagagtcctcccagcaccttgggacaaggtgttcccctcccctcactactgtgctgctttctcttcccttctccttcccaactcaaagcctcatctcagagccttttagaatctctgatagaccgggcacggtggctcacacctgtaagcccagcaactttgggaggctgaggtgggcggatcacctgaggtcgggagtttgaaaccagcctggccaacatggagaaaccctgtctctactaaaaaatacaaaatcagccaggcgtggtggcacatgcctgtaatcccagctactcgggaggctgaggcaggagaattgcttgaacccaggaggcggaggttgccgtgagccgagatcacgccattgcactccatcctgggcaaaaagatcaaaactctgtctcaaaaaaaaaaaaaaaaaaagaatctctgataaaatgtacactagggggtgggtgcagtggctcacaccccgtaattctatcactttgggaggccaaggtgggtggatcgcttgaggccaggagttcaaggccagcctgggcaacatagcaagaccctgtctctacaaaataataataaagattatatatatatatatatattcactcatgcgcagtggctcatgactgtagtcccagctacttgggaggctgagacaggaggatcacttgagcacaggagttggaggctgcagtgaactgagatttcaccactgcactccagcctgggcaaaagagtgagatccggtctcaaaaaaacaaacagaaaaaaaccctccagggcaggcacagtggctcacacctgtaatcctagcactttgggaggccaaggccggtggatcacttgaatccagaagttcgagatcagcctgagcaaaataggaagtccctgtctctatttaaaaaaaagaaaaaaaaaaaaatatatacacacacacacacacacacacacacacacacgtacacacacatatatatacgcacacatatatatgtgtgtatatgtgtgtgtgtatatgtatatgtgtgtgtgtgtgtgtgtgtgtatatatatatatatgcagggcgtggtggctcacgcctgtaatcccagcactttgggaggctgaggcgggtgagtcacctgaggtagggagttcgagaccagcctgaccagtatggagaaacccgtctctactaaaaatacaaaatagcccgatgtggtggcgcatgcctgtaatcccagctacaagggaggctgaggcaggagaaccacttgaacccgggaggtggaagttgtggtgagccgagatcgcgccattgcactccagcctgggcaacaagagcaaaactccgtctcaaaaaaaaaaaaattatctgtcctctgtgtattcatccccacctcttccctaacccccggcaacctctgatcttttaactgtcttcatagctttgtcttttctggaatgtcatacaactggaatcacacaacatgtagccttttcagattagcttctttcacttagtgataggcagttaagcttccgccatgtcttttcaaggcttgatagctgatttattttattttatgtttttttacatacatatatatatacatatacatatacatatacatatacatatacacatatacatatacatatacatatacatatacatatatatatatacatatacatatacatatatatatacatatacatatacatatatatatacacacacatatatatatatatatatttgaaacggagtctcactctgttgcccaggctggagtgcagtggtgtgatctcggctcactgcaagctccgtctcccgggttcactccattctcctgcctcagcctcctgagtagctgggactacaggcacccgccaccacacccagctgatttttcgtatttttagtagagatggggtttcaccgtgttagccaggatggtctcgatctgctgacctcatgatctgcccacctcggcctcccaaagtgttgggattacaggcacgagccaccgcgcccagcctttttttgtgtttttagtagagactgggtttcgccatcttgtccaggctggtcttgaactcctgacctggtgatccacctgcctcagtctcccaaagtgctgggattacaggcgtgagccagagcgccctgctattattattaatttttagagacagggccttgccttggcgaccaggctggagtacagcagtgtgatcctagctcactacagcctccaattcctgggctcaagcaatcttccttcctcagccccctgagtagttgggactactccttatgcttggccaggcacagcggctcatgcctgtaatcccaccactttgggaagccaggtgagaggatcactggagcccaggaattggagactagcctgggcaacatagtgggacctcatttctacaaaaatattaaagaattagccaagtgtggtggggtgcacctgtggacccagttactcagggggataaggtgggagaattgcttgagcccaggaggtagagattgcagtgagccaagatcataccactgtactccagagtggctgactgaacaagaccatgtctcaaaataaataaataaacaaacaaacaaacgaaaaaataaactccatactcatttagcaatcactcccattcccccgcctcccaacccatggcaagcgcgaatctgctttctgtgtctatggatttgcctttttttttttttttttgagacagagtcttactctgtcccccaggctggagtgcagtggtgtgatcttggctcactgcaacctccgcttcccaggttcaagcaattctcctgccccagcctcccgagtagctgggattacaggcacgcgccaccatgcgtggctaatttttgtatttttagtgaaggtggggtttcaccaagttggccaggctggtctccaaggcctggcctcaagtgatctgcccgcctcagccttccaaagtactgggatgacaggggtgaaccactgagccccgccaaggatttgcctattttggacattttatatcagtggaatcatataatttattgtattctgtgactagcttcttgcactaagcataatgattgaaggtcaactcacattttagaatgaatcggtacttcattcctttttcttttttttttttttttttgagatggagtctcgctcttgttgcccaggctggagtgcagtggcacggtgggatctcagctcactgcaacctctgcctcctggcttcaggtgattctccctgccccggtctcccaagtagctgggactataggcacgcagcaccacacccagctaatttttgtatttttagttgagactgggtttcaccatgttggtcaggatggtctcaaactcctgacctgatccacccgtcttggcctcccaaagtgctgggattacaggcatgagccactgcgtctggcctttttttttttttttgaaatagagatggggtcttgctatgttgtcctgatctcatgggcccaagtgattctcccacctcggcctcccaaagtgctgggattacaggcatgaaccatcgtgcccagcccaacttaattcctttttatggctgagtaatattccattgcatggacaaatataggacattttaattttctattcatcagctgatggacatttgagttttctctactttttacctggcaagaataatgctgctatgaacatttccatacgtgcattttatatgtttgtatgttttcttatctgttgaatatatacctaggcatgcaattgttggctcatattagaacctgaggaattgttttccaaagcaaacaactagactcttttcttttcttttttatttcctttcctttcctttcttttcctttcctttcctttccctttccttccttccttccttcctctctctctcttttttttttgagacagggtctcattctgttgcacagattggagtgcagtgttgttgttatcatggctcactgtaactccaaactcctcggtttgagtgatcctcccacctcagcctcccgagtagctggaactacaggcatgtgccaccacacctggctaattttttttttttttgagacggagtctcgctctgttacccaggctggagtgcagtggcatgatctcggctcactgcaagctccacctcccgagttcacgccattctgctgcctcagcctcccgagtagctgggactacaggcgcctgccaccacgcctggctaatttttttgtactttttagtagagatggggtttcaccgtgttagccagtatggtctcaatctcctgaccttgtgattcgcccacctaggcctcccaaagtgctgggattacaggcgtgagccaccgcgcccggcctacacctggctaatttttttgtattttttgtagagacaaggttttgccatgttggccaggctggtctcgaacacctgggctcaggtgatccaccttccccaggctcccaaagtgctgagattgtaggcatgaaccactgcacccagcctagaccattttctaaagcaatggcaccactggccaggcatagtggcccatgcctataacctagaactttccgaggctggtgtgggaggatcatttgcccccaggagttctagaacagcctgagcaacataacgagactcccatctctacaaaaaataaaaagttagccatggtaatgtgcacctgtagtcacagctactcaggaagctgatgtggaagaatcacttaaacccaggagttccaggttacagcgagccatgatcacaccactgcactccagtctgtgcaacaaaatgagaccttgtccctaaaaaaaacacaaaagaaaaagaaggaagaaatgcatttaaaaaaataataataagaccgggagtggtggctcacgcctataatcctagcattttgggagccagaggcgggcggatcacctgaggttgggagctcaagaccagcctgaccaacatggagaaaccctatctctactaaaaatacaaaattagccaggtgtggtggtgcatgccagtaatcccagctacttgggaggctgaggcaggagaatcgcttgaacccaggaggtggaggttgtggtgagccaagaccatgccattgcactccagcctgggcaataagagtgaaagtctgtctcaaaataataataataataataataataataataaaacaatgacaatattttaccttcccaccggcaatgtataaggattacaatgtctctgaatcttcaacaacactcgttaatttcttctttgtttgtttttgttgttgtttgttttttgttttttgtttttttgagacggagtttcactctgtcacccaggctggggtgcagtggcgcgatatcggctcgctgaaacctccacttcctaggttcaagtgattttcctgcctcagtctcccgagtagctaggattacaggcgcacgccaccatgcccagctactttttgtatttttagtagagatggggttttgccatgtaggccaggctggtctcgaactcctgacctcaggtgatctgcctgcctcagcgtcccaaagtgctgggattagagatatgagccactgcccccagacctattttctgatttttattgtggccatactagaagacgtgaagtggtgtctaattgtggtttggatagttattactagctgggtgtggtggctcacatctgtaatcccagcactttgggaggcacaggggggagaattgcttgaagccaggagttcaagactagcctgggcaacaaagtgagacctcatttctaaaaagaaaaagaaaacattagccaggcctggtggtgtagtggtgggcctctgcagtctcagctactcataaggctgaggcagggaggatcgcttgagcccaggagttcaaggctgcggtgagccatgttcacgttactgcattccagcatgggcgacagagcaagatcctatctaaaaaaaaatagaaacaggctgggcatggtggctcatgcctgtaatcccagcactttgggaggccgaggcaggtggatcacgaggtcaggagatcaagaccatcctggctaacacggtgaaaacctgtctctactaaaaatacaaaaaattagccgggtgcagtggcgggcgcctgtcgtcccagctactccggagctgaggcaggagaatggtgtgaacccgggaggcggagcttgcagtgagcggagatcaccccactgcactccagcctgggtgacagagcgagactctgtctcaaaaaaaaaaaaaaaaaattagaaacaggccgggcacagtggctcatacctgtaatcccaacaatttgggaggccaaggtgggtggatcacctgaggtgaggagttcaagaccagcctggccaacatggtgaaaccctgtctctactaaaaatacaaaattagctgggcgtggtggcacatgctgtaatcctagatactttggaggctgaggcaagagaatcacttgaacccgggagacagaggttgcagtgagccgagatcacgccactgcactccagcctgggcgacaagagcgaaactccgtctctattgatcacgacactcacagtgcagtccatccttcttttctttctttttttttggggggggctgtgggggttaaggtctcactctgtcacccaggctagagtgcagtggaacacagtttattgcagccttgaccttctgggctcgaatgatcctcttccgttagcctcccaagtagctgggatcacaggcatgcaacaccatggccagctaattttttcatttttagtttttgtagaaatggggtctccacatgttacccaggctggtctggatctcctgggctcaagtaatttacccaccttggcctaccaaagtgttgggattataggcatgagctcactgttttacccaagctggtcttgaactcctggcttcaagggatcctccaacctcgccctcccagaatgttgggattacaggtgtgagctaacatgcctggcaaacagcatacattctttttattgctttaataaaaatgtaattttgtttctctttgaaggatactgttgagaagtgtaattactatgatgtataatttgtccacgtaggggtacttgctttttttttctttacttgactctttgttttttttgaggcagagtttcactcttttgcccaggctgaagtgcagtggcgcaatcttgcctcactgcaacctcctcctcctgggctcaagtgatcctcctgcctcggcctcccgagtagctgggactacaggcatctgccaccaggccagcctaattttcttttctttctttctttttttttttttgagacagattcttgctctgtcacccaggctgggtgcagtggcacaatctaggctcactgcaacccctgcctcctggattcaagccattctcctgcctcagcctccccagtagctgggattacaggcgtgtactgccacgcctggctaatttttgtatttttagcagagatggggtttcaccatattggccaggctggtctcgaactcctgacctcgtgatccgcccaccttggcctcccaaagtgctgggattacagatgtgggccactgcaccgggccctaattttgtattttcagtagagaacaggtttcaccatgttggccaggctggtctcaaactcttgacttcaagtgatctgcctgccttggcctcccaaagtgctgggattacaggcatgagccactgcacccagcctccagtgtctgggaatgtgccgtttgtcttaccaggaatacatttccttcccccccttttttttttttgctaactcctactcatccattagattccatgatagacatttctagcatagacaacaatccattgaatgaaaaactgccatttgcagatagctggctctcctgactaattctgaccattgaagtgggagtgaggtggcatacattattctatatgtctttcagttctgaacagaggcatccaaaaacttatgcatggctctcctgtctgcctcttgctcctctgtgataactgaagcagagagtttcagatagtgcagccacaagatgacgggagacttgtcatcctgggctcctgaatgactgtgtggagctgagcccctgccagtccatataggatgaatagcctgagggagaaatcaactttgattgtgttaaaccactgagctttgggctggtttgttactgcagcaaatcttgacctactctgactaatacagaacccaacttaaatgtggcttccccagagaagtcctcctggatcacagcccccagaatcagtttcttccccttttgtaagcttgtatgttcttacttgatcattactgcaaacataactgtataattatttgtgtaatgagttcatcatctctctgctccaccccatctccaaaaccccaaggggagacaacagtgtggattttccattgctgcagcctggactcaaaatagtgtctgatgcatagtaggtaccctggatacatttgttgaatgaaagagttttgtggcagggcgcggtggctcatgcctgtaatcccagaactttgggaggccgaggcaggctgatcacgaggtcaggagttcgagaccagcctggccaatatggtgaaaccctgtctctactaaaaatacaaagttagctgggcatggtggcacgtgcctgtagtcccagctactcgggaggctgaggcaggagaatcgcttgatcccgggagatggaggttgcagtgagccgagatcatgcaactgcactccagcctgggcaacagagtgagactccgtctcaaaaaaaaaaaaaaaaaagaaaagaaaagagagagagtttttcatcctttcagccaaaggcagcaagaccaggcacagtggctcatgcctgtaatcccagcactttgggaggccaaggcgggccgatcttctgaggtcaggagttcaagaccagcctggccaacatggtgaaaccccgtctctactaatagtaaaaaaattagcctgggcatggtggtgcaagcctgtaatcccagctactcaggaggctgaggcaggggaatcacttgaaccctggaggtggaggtcgcagtgagccaagattgcgccactgtactctggcctaggcaacagtgagactctgtctcaaaaaaaaaaaaaaaggcagcaattagcaggactcttttatagaacatcattcatgtaacccacagggtaatggatgcatgagaggcgggactggatggccccaagaaacaggggaagtttgacaaggaacatgatctattgtgagaaagtacctatccacatagttaacgttttcttcaagactgtaatttgttccaacaactgctctgcctgggagggatttccgggcatgatttatttcactaagaggcatgggaactgggtggagatgcatggaaacattttttgaatagttgagaggcccaggataaaattcatgcacagacgccacaatgcagtcagtagaaggaaatgttatcttattgggttctactcaagggcagttttgagtcagtgctctaatgccaccatactgatttgttttctcaactctattaaggaatacttgacatgtaataagctgcacatacttaaaatattccatagcagaacatgggggcacatgcctgtaatccttgctgctcaggaggctgaggagggaggatcacttgagcccaggagtttgaggctgcaatgagctgtggtggcgccactgcactccagcctgggagacagagtgagacgataacaaaaataaaataaattagctggccaggcgcggtggctcatgcctgtaatccacacctgtaatcccagctctttgggaggccaaggcgggtggattgcctgagctcaggagttcgagactagcctgggcaacacagtgaaaccccatctctactaaaaatacaaaaaattagccaggcgtggcagtgtgcacctgtagtcccagctacttgggaggctgaggcaagagaattacttgaacccaggaggcagaggttgcagtgagcggagaacacaccactgcactccagcctggacaacagagtgagattccgtctcaaaaaataaaaataaaaaataaaataaattagctgggtgtggtggcgcatgactataatcccagctactgggggaggctgaggcaggagaatcgggagaatcgcttgaaccgggaggcggagattgcagtgagccgagatcgcagcactgcactccagcctgggtggcagagcaagtctccgcctcaaaataaatgaataaaataaaatagtctagttcctgtacatcttctccaacactcattaaggtcagtgtttctcattttagaggttctagaggattttggggggtatctgatttctatgttattttgaattttcccgatggctaatgatgttcagattctttttttttttttcccacagaaccattcaagtgtaactttttttttctttttatagagacggagtttcactatgttgcgcaggctggtcttcaactcctggcctcaagcaatcctcccacctcagcctcccaaagtgctgggattacatgtgtgagctaccatgccagtctttttttttttctttatagagaccagttctcactctgtcacccaggctggagttagtggcacgatctcagctcgtcacaacctccggctcctgggctgaagctatcttcccacctcagcctcacaagtagctaagaccagagacatgtgccatcaagcctgcctattttttttttttttttttgtagagacagggtctccccatgttgcccaggttggtctcaaacttgaactcctgggctcaagcaatcctcctgcctcagcatcgcaagtgctgggattacagtcatgagccaccgtgcctggccataatggatattcttttttttgagacagggtctgtctctctctggtaaccaggctggagtggagtgcagtggcgcactcacagctcactgcagcctccacctcctgggctcaatgctcccacctcagcctctgaagtagctgggactacagatgagtgctaccctgcccagcttttttttttttttttttttttttttttttgtagagaccatggtctcactatgttgcccaggctggtctcaatctccttggctcaagtgatcctcctgccctggccttccaaagtcctgggattacaagtgtgagacactgcactcggctgagagttttgttcttacagccgacttacagattcacaagcaatgacacagctgattaggaatgatggcaagtgtgatcaggtggacctgagaacacacacagggcgacttgcccaagctggaggtcaggacaggcctctgagctgtgggtgggcaagctgaggcctgctggagaagagggagaaaccgactccattcatttccaggcttgcagtaattaattcgcacaaactaggtggtttaaaacagacgtgtattctctcacagctctggaagctagaagtccaaagtcaaggttggtggtagagctatgccctgtctgaaggctctagaggggaattcatagctgggtccttcctagcttcccatggtctttttgtttgtttgtttgtttgtttgtttttgagatggagtttcgctcttgttgcccatgctggagtgcggtggcacaatcttggctcactgcaacctccacctcccaggttcaagcgattctcctgcctcagcctccttagtgcaggtgcctgccaccacgctcagctaatttttgtatttttagtggagacagggttttgccgtgttggccaggctggtctcgaactcctggcctcaagtgatccgcccacctcagcctgccaaagtactgggattacaggcgtgagccactgtgccccacccatttgacaaaaattttttaaaattagccaggcgtggtggtgtgctcctgtagtcccagctactcgggaggctgaggcaggaggacagcttgattcttgtagttggaggctacagtgagctatgattacaccactgcactcctgggccatagagcaagatcgagtctctaaaaattaatcaatcaatctgcaaagactctatttccaaataaaggcacattcacagatacccagggttaagacttccacatgaatatttggaggacagagaattcaacccacaatccaggctgacctgtgacagtgacagttatttggcatccaaagtgtggctacgagttcaatcttggaaagcctgggacagcccagccagggggttcctgaggtgtaggtgcgtggtgactggcttttttaagggcacgaatcttttgggagcagaaggaggaagacaggaggaagggaagaaattgttgagagacctgggtcagtctcaccagactgagtgcagaagccgaagacccctggcctctacactgggctcaaagtggtcaactccacggccaggggcaatggctcacacctgtaatcctagcactttgggaggctgaggcaggtggatcacatgaggttaggagtttgagaccagcctggccaacgtggtgaaacactgtctctactaaaaatacaaaaattagccgggcatggtggcacgcgcctgtaatcccagctactagggaggctgaggcaggagaatcgcttgaacccaggaggcggaggttgcaatgagccgagattatgccactgcaatccagcctgggcaacaagacggaaactccaactcaaaaaaaaaaaaaaggtggtcaactccaacagaatgtagtggtgtgtgcccatggtcccccctactcgggaggttgaggcaggatcgtttgaacccaggaggtcaaggctgcagtgagtactgattgcactactgcactccagcctgggtgacagagaccttgtctctatttcattacatgttgagatgataacattttggatgcgttgggataaataaaaagaattattaaaattgatatcacctgtttctttttacttttaaaaaatgtggctaatagaatattgaaaattatatttcatgttatttttctactggattgtacttctccaattttgggttggttttttttttttggtttgtttgtttttgttttgttttgtttttttaaacggagtctcaatcccgtcgcccaggctggactgcagtggagcaatctcagctcattgcaacctccacctcccgggctcaagcgattctactgccttagccccccgaatagctggaactacaggtgcctgccactatacccagctaatttatgtatttttaatagagacagggtttcatcacactgtctaggctggtctcgaattcctgacctcaagtgatctgcccgcctcggcctcccaaagtgctaggattacaggtgtgagccacagccgccggattcttttccagatttttttggcatgatggaatttgtttataaaaataccgttctaagctgagtggggtggtgtgtacctgtattcccagctactcgggaagctgaagtcggaggattctttgagctcaggagttggagaccagctagctagggcaacacagcaagaccctgtctcaaaaaaaaaaaaaaaacattaaaattaaaaaacagctaggtccttctagctgtttgtggatttgaggggtcagacatagcagctaagagaccagggactaggatgatggatgctggacccaggagggcagtggtgggaataagaataacaagaacagtcataattcacactgacgtggtggagaccatgtgcctggcactgttcaaagcattgtgcatattcacttcatccttctcccaaacactagaagggaggcagtatcactaccccatttggcagataaagaaactaagacagtggccgggcaccgtgactcacccctgtaatcctaacactttgagaggctgaggcaggaggatcacttgtgcccagggattcaaggctgcaggaagcaatgattgcaccatcacacttcagcctgggcaacagagtgagaccccgtctctctctctttttttttttttccaatgaatcaattttattttcagactttcatagttagtctaattaaatcaatttaaagttctcactttcttgacatgcttaagaagtatagtgtagtgggtgaaatcatagacgccggagacaggacttcctgggttagaattccagatcagcaacttactagaatgaaaccttggccacattatgtcatctctttgtgtctccatttgctcattgcttggcgataggtgattgtctcaccgctcagcgataggcgatggtctcaccgctcggcaattggcgaaggtcccatctgggtcgccaaaatgtgtccggaattggtgggttcttggtctcactgacttcaagaatgaagccgcggaccctcgcggtgagtgttacagttcttaaaggtggcgtgtccagagtttgttccttctggtgttcagatgtgttcggagtttcttccttctggtgggttcgtggtctcgctggctcgggagtgaagctacagacctttgcggtgagtgttacagctcttaaaggcagtgtggacccaaagagtgagcagtagcaagatttattgcaaagagcgaaagaacaaagcttccacagtgtggaaggggacccgagcgagttgcccaaccccatctctcaaagaaaaaggaactgaggcagagagtggcgaggtcccttatctgagccatctggctgcacagtctgtactgagtgcagaatccaaagacccctgggcctacactgggctcaaagtggtcaactccaatggaatgcggttgtgtgtgcccacggtgccagctactcaggaggctcaggcaggatcacttgagcccaggaggtcaaggctgccatgagtcctgattgaaccactgaactccagcctgggtgacagagtgagactctgtctcgaaaataatacacttgggcacagtggttcatgcctgtaatcccagcactttgagaggctgaggagggcagataccctgaggtcaggcgttcaagactagcctggccgacgtggcgaaacctgtctctactaaaaatacaaaaaattagctgggtgtggtggcgcgtgcctgtaatcccagctactcgggaggctgaggcaggagaatcacttgaatccatgaggtcgaggttgcagtgggccaagatcgcgccactgtactccagcctgggcaacagagtgagactctgtctcaaaaaaaaaaaaaaagggaattggggttggacgcaatcttgagggtggggccctcacaccattctcctgcctcagtctcctgagtagctgggactacaggcgcccgccaccatacctggctaattttttgtgtttcactgtgttagccaggatggtctttatctcctgacctcgtgatctgcctgcctcggcctcccaaagtgctgggattacaggcatgagccaccgagcccggctgagaccaggatgtcaaggcttcagtgagccaagatcatgatgccactgcactccagtactggcaacagagtgagactgtgagaaaaaaaaaaaaaaaagaaaggaaggcaggtgagaggatataagataagaagagaatctcagctgggcgcggtggctcacgcctgtaatcccagcactttgggaggccaaggcaggcagatcacctgaggtcgggagttcgagaccagcctgagcaacatggagaaaccctgtctctaccaaaaatacaaaaaattagccaggtgtggtggtgggcgcctgtaatcccagttactcgggaggctgaggcaggagaatcgcttgaacccgggaggcagaggttgtggtgagccgagattgccattgcactccagcctgggcaaaaactccatctaaaacaaaaaaacaaaacaaaacaaaaaatagaagagaatcccaccaagaaccatgctggcaccctgatctgggactttctagcctctagaactgtgagaagcaaaggtgtgttgttttagcccccaaggctatggtatttgtcacagcagcccaaggggataaagacagtaaggttgtgataactactcccatgcggcggggagggggaaaaaggcagggaagagaaggagaccaaggatggagatgggggagaattttgagagtggtaatcttcgtgtaggggtgatatttgaataaagacttgcggccgggcacagtgtctcacgtctgtaatcccagtactttgggaggctgaggtgggtggattacttgaggtcaggagttcgagaccagcctggccaacatggtgaaaccccatttctactaaaaatataaaaattagctgggtgtggtggcacatgcctgtaatcccagctactcaggaggcaggaggatcactggtgcccagaaggtcgtggttgcagtgagttatgatcgtgccactgcactccagcctgggcaacaaagtgagaccctgccaaaaaaaaaaaaaaagacctgaaggaggtgacggagagccatggtaagaaacgtggtctgggcagagggaacagcaagtgcaaagactctgaggtggcattggctctgttgagtttgagaaagggtgcacttggctggttgcagtggctcaagcctgtaatcccagcactttgggaggcccaggcgggcagatcacctgaggtcaggagttcaagaccagcctggtcaacatggtgaaactctgtctctactaaaaatataaaattagccgggtgtggtggctcacacctgtaatcccagctactccagaggctgaggcaggagaattgcttgaacctgggaggcggaggttgcagtgagctgagattgtgccagtgcactccagcctgggctacagagcaagactctgtctcaaaaaaataaaataaaataaatcaataaattaataaattaatgaaagagaaaggggtcaattgtgattgaaggcgactgggaggagaggggaaaaaaggaaagtcagggaggtgactgccccttttgtgccttctccttcttggatcacaccctcattcaaatctttcttacctccttcagagagctgaggacagagccccggggctggccactagaggccaccctctccatggctcacagggtcactgcattgtcatcatgcagttggctctcactgagccccaactgttcctcaaataccactctaagcactttacattggtaagttcagctcattcccatacatctttatgagttagacacatttaaaactttttcctggctgggtgcaatcgctcatgcctgtaatcccagcactttgggaggccgaggctggcggatcacctcagtcaggagttcgagaccagcctggccaacgtggtggaatcctatctctactaaaaatacaaaaattagctgggcgtggtggtgtgcgcccgtaatcccagctactcaggaggctgaggcagcagaattgcttgaacctgagaggtggtggttgcagtgagccaagatcgcactagtgcactccagcctgggcaacaagagcgaaactccatctcaaaataaatacataaataaatgaaaataaaataaaaaataaaaattgtccctggccaggtgcagtggctcatgtctgtcatcctagaactttgggaggctgaggctaatcgtttcagcccaggagttcaagactagcctgagcaacactgggagactctatctctacagaaaaatttttaaaaattagccaggggtggccaggcacggtggcccacgcctgtaatcccagcactttgggaggccgaggtgggcggatcacgaggtcaggagatcgagaccatcctggctaacacgatgaaacctcgtctctactaaaaatacaaaaaatcagccaggcgtggtggcgggcgcctgtagtcccagctactcgggaggctgaggcaagagaatggtgtgaacctgggagacagagcttgcagtgagtcgagatcgcgccattgcactccaacctgggcaacagaacgagactccgtctcaaaaaaaaaaaaaaaaattagccaggggtggtggcatgtgcctatagtcctagctactcaggtggctgaggcaggagacttgcttaagcctcggcagttgagactgcagtgagccatgatcaggccactgcactgtagtctggatgacagagcaagaccctgtctcaacaacaacaaccaaaatctgtttgggcctcgcaaggttagagaaaaaaaattaaaaaataaaataaaataaaatattttcctgtagtctcagctacttgggaggctgaggcaggaggatcacttgagctaaggagtttcaggccagcctgggcaacatagagagaacttgtctctataaaaagttaactgattactttttaaaacaaagaggttttttttcagccttattgaggtataatagacatatacaaaaccatgcaaattttaagcgtacaatctgatgagttttcacacctgtgaagccactattacagttaagatactgaatttatccacagctccaaaaaatgtcttcctgcctgaggtggtggctcacgcctgtaatcccagcatttgggaggctgaggcgggaggatctcatgaagccaggagtttgagaccagcctagacaacatagcgagaccccttatctacaaataaaatttaaaaaattaaccaggcatggtggctcctgtctgcggtctcagctactctggaggctgaggttggaggatcagagttggaggctgcagtgagctatgaaagcgccactgcactccagtctggacaacagagccagatgctgtctcgacaaaacaaacactgaaaaaaactttcctggagcacttcattcatccctccctcccgcgcctgcctacccctggattttttttccctgagcataattctcatgaagattcgtctatgttgttgcgtgtattccagccctattttgcacatgaggaaactgaggcacagagaggcgtggcttgccccggaggtcacactagtcgatttggtcccaggccagggcgggttctgggtcggcagcccgcgcaggtgcactcgggaggcggggcgggcgctgcaggtgcgcagtcagtctcacctgggcgcctgccaggaggtcagtcctgggccctggggggcaggactaggggcggggccaggggcaggggttccccagctctgctgcctccgataagggcctgaaggggctgtcgcgctcctggcggtgtgataaggagggcggggggaggccgcgggaaggcgtcggggtttgaggtccccgcctggcgacccgggatcggggcaggaaaggcggctgggcggggagagggcggggcggggcgtctggcttggccacgcccaccgtcatccggggtcctggcccgctaagatggcgatggctgcggtagcagcggcggcggctgttgcctggcccggtaccctggggacgggggccgagtagcgccttccccgggccccgtgaaccggctgcgggtcgcccttggggggcagcggccgcagccccccacctgggccctcggtccgccctcccggcgcgtccatgaactcagtgtcgccggccgccgcgcagtaccggagcagcagcccggaggacgcgcgccgccggcccgaggcccgcaggccgcggggtcccagaggcccagaccccaacggcctggggccttccggagccagcggccccgctcttggctctcccggggctggcccgagtgagccggacgaagtggacaagttcaaggccaagttcctgacagcctggaacaacgtcaagtacggtgaggagggggcccggagatcgtgggggtgtcgggggccgttgaggaaaaccagaccccggtcctgccagttatcccacccttgttcccgtcctgagtcacctgtgggtcccctccctgcccggcccagggtggacctgtggcaggtccaatagtgttttcaagccccgcccattcccctgtgtgaccttgggcaagatcctttgcttcctggcgcctccgtttttgcccctctctgtaaaatgggtacaataatcagaactaccttccttcatcctgaattgatggtggacactcctgtagctgtcactgggggccccacctccgacggaatccccggagccaccccggagataggaactaggatcgtgcccatttcacagatgggggaatggaagcgctgttgctgtcatgcaagtgcttcatctcgctgggcgctgcccctacgtctccccaggttgggtggttaaaagccggaccagctttagcaagatctccagcatccacctctgtggccgccgctaccgtttcgagggcgagggtgagctggtggttgggaccagggctgggggaggcctctccacgcccgccggagtgtccctggtggcagctgacagacccgctcttgtaggtgacatacagcgtttccagcgggactttgtgtcccgcctgtggctcacataccgccgggacttcccgccccttcctgggggctgcctgacctcggactgtggctgggggtgcatgttacgcagcggccagatgatgctggcacagggccttctgctgcatttcctgcccagaggtgagccataggggggaaggggtgcactaggagtacagggtcaactgccatatcagcagtattagaattacttaccaactaagagttcaaagtcacgttagaattgtgtgtcaagtaagttttggagagatgagagttgtttataagagtttcagccggggttggaaacggtggctcatgcctgtaatcctagcactttgggaggctgaggcggatggatcccttgcggtcaggagttcaagaccagcctggccaatatgatgaaaccccatctctactaaaaatacaaaaattagccggttgtggtggcacacgcctgtaatcccagctactcccgaggctgaggtgggagaatctcttgaacccaggaggcggaggttacagcaagccaagatcgcaccactgcactccagcctgggcaacagagggagactctgtgtcaaaaataaaaataaaaaaaagtttcaccaggcacggtggctcatgcctgtaatcccagcactttgggaggctgaggctggtggatcatgaggtcaggagttcaagaccagcctggccaagatggtgaaaccccatctctactaaaaatacaaaaattagctgggtgtggtggcaggcacctgtaatttggcaaggtaaagcagagaattgcttgaaccggggaggcggaggttgcagtgagccgagatccgtgccactgcactccagcctgggtggcagagcgagactcagtctcaaaaaaaaaaaaagagttttggctgggcactgtgctgcatgcttgtaatcccagctacctgggaggctgaggtgggaagattgctcgtgcccaggtgttcaagtctgcagtgaactatgatcctgccactgcactccaacccgagtgacagaatgagactccaacaataacaggtcgagtgtggtggctcatgcctgtaatcccagcacattaggaggctgaggcaggaggatcgcttgagcataggcattcgacaccagcctaggccacatgacaaggctcctgtctctacaaaaaaattttaaaaattagctgagtgtggtggcatgtgcctgtgatcccaactactcaggaggctgaggcgggagaatctgttgagctcaggatttagaggctgtagtgagacgtgattgtgccactgcactccagtctggatgacagtgagatcctgtctttatttatttattttatttattattattattatttttttttttgagactgagtcttcctctatcatcctggctgaagtgcagtggagagatcttggctcactgcaacctctgcctcccaggttcaagcgattctcctgcctcagcctcctgagtagctgggattacaggtgcccgccaccacgcttgtctactttttgtatatttttttttttatcagagaaggggtttcaccatgttggccaggctggtctcgaactccaggcctcaagtgatccacctgccttggtctcccaaagtgctgagattacaggcatgagccaccgcgtctggctgagatcctgtctttaagtaacaaaaaataaataaataaataaggataagtatatgtttcaggaatatgtaaattctgttgaattacggggttcaggagcattcgcattgtgtgcggtgcatgtgtagatgggacctctgccccccacacactagcactgtttgactatgtgctccattccaccagactggacatgggccgagggcatgggcctgggcccccctgagctgtcagggtcagcctctcccagccggtaccatgggcctgcccgctggatgcccccacgctgggcccagggtgcccctgagctggagcaggaacgccggcaccggcagattgtgtcctggttcgccgaccacccccgggccccctttggcctacaccggctggtggagcttgggcagagctcaggcaagaaggcaggtgactggtatgggccatcgctagtggcacacatcctcaggtgagggctgctgcagggatcacgggagttgctgggtacccgcaggcactcaggccttccctcctgcccccaggaaagccgtggagagctgctccgacgtcacccgcctggtggtgtacgtttctcaggactgcacaggtaaggggctgggagccaagatcacaggggccccaccctgagccagactctgccttacccgattcttagagtgcatcttcctcagaggctggaacaagttgtggggcagagggacactggggaaggatgcaaggcctgtgcagtgggagatagtccctcttctccgtctctccctctggaacaagaaacttcaggggcttctccttgagtgatagaatagagacataaggccaggtgtggtggcacatactgtagtctcagctacttgggaggctgaggtgggaggattgcttgaacccaggagttcgaggttacagtgagctgtcattatgccattgcactccagcctgggcgacagagtaggatcctgtcgaaaaaaaaaaaaaaaaaaaaaagaggccaggcgcagtggctcacgcctgtaatcccagcactttgggaggccaaggtgggtggatcacctgaggtcaggtcactctgtcacccaggcttcagtgcagaggcacgatctcggctcactgcaacctctgcctcctgggttcaagcgattctcctgcctcagcctctcaaatagctgggattacaggcacgcaccaccataccaggctaatttttctatttttagtagagatggggtttcaccatgttgacaaggccggtcttgaactcctgacctcaggtgattcgcccactttggcctcccaaagtgctgggattacaagcttgagccactgtgcccagcccctgtaatttttttttttttttttttttttttttttttttttttttttttttgagacagagtctcactctgtcacccaggctggagtgcagtggcacagtcttggctcactgcaacctccgcctcctgagttcgagtgattctcctgcctcagcctcccaatagctgggactacaggcgcgtgccatcacgcccagctaattttttttgtatttttagtagagttggggtttcactgtctttgccagtatggtctctcgatctcctgacctcatgatcccccctcctcggcctcccaaagtgctgggattacaagctggagccaccgtgcccggctacctctgtaaattttttatgcaaaattgtaggtgtttgggaaaagattcgattttcagagaaccttatctccaaaatgggtctaatctacttctctaggagcacaaaatgggcttacgtagctgcaaggcagggggcaggagaatgggcccaagtaaatgggactggaggaggagggacataccaggatatttggtttaggggctgagtgcccagtgctccagcttctgtattggcaaaccgaggcatggagtcactgaggacctgtcaggcatggggctggggaggagcttgagagaacagtctctacctctcccttctgtatatacttttggtctacatcccagggcctcagttgcccactctgtaaaatggggatgtccacacctgcctggaggtcctgggattttctgggggtgtttggggggcactagaatgatgattttggttagtgatgacagtgttgccctctgagaaattgcacggttgaggttgagcccctggggttagagggctacgctggggcttgaagggtggcaagaaggtgacctgctgctgtcccgtccctccagtgtacaaggcggatgtggcacgcctggtggccaggccagaccccacagccgagtggaagtctgtggtcatcctggtgcccgtgcgactgggtggcgagactctcaaccccgtgtatgtgccctgcgtgaaggtaggttcagctgaattctaggacacctccacctgggagccctccagacttgtttagtttgtgttagggctgctgtttgtgcagccctcatcacttttttttttttgagatggagtttcgctcttgttgcccaggctggaggtcaataacgtgatctcggctcgctgcaacctccgcctcctgggttcaagcgattttcttgcctcagcctcccaagtagttaggattacaggcatgcgccaccacgaccacctaattttgtacttttagtagagacagggtttcaccattttggtcaggctgatcttgaactcctaacctcaggtcatctgcccacctcggcctcccaaagtgctgggataacaggcgtgagccaccacacgggccatccctttttttttgagacagagtcttgctcttttgcccaggctggagtgcagtggcacagtcttggctcattgcaacctccgcctcccgagttcaagcaattctcctgcctcagtctcccaggtagctgggactacaggcgtgtgccaccacgcccggctaacttttgtatttttagtagagacggggtttcgccatgttggccaggctggttctcaaactcctgacctcaggtgatccacccacctcagcctcccaaagtgctgggattacaggtgtgagccaccacgcccggcccatcccttctttttttatactatgcagcacctgctatgtgtgctccccactgtcccgactgctggggattcagaggggaacagaataggcaggagttctgagtgtgcctgctgggagcagacgttctgatgggaggatgctcagcagtggctatgtaaccaaagtagcatcactgtttggaatgaagccaggcacagtggctcaggcctataatcccagcactttgggaggccgaggcaggaggatcatttgagaccagtctgggcaacatagtgagacccccatctctacacaattttttttgaaaatattcgagtctcactctcttgcccacgctggagtgcagtgacaccgtcttggctcactgcaacctccgcttcccaggttcaagcaaatttcctgcctcagccacccaagtagctgggattacaggtgtatgccaccacgcccggctaatttttgtatttttagcagagatggggttttcccatgttggccaggctggtcttgaactcccgacctcaggtgatccacccacctcggtctcccaaagcgttgggattacaggcatgagccactgcacccagcctctacacaactttaaaaaaacagtaacccaatgaagggcagatgagggtagcagcagagcctagaaaagcgcctctgcagccaccaggcaaatgaggagccagaggagaagtgctccaggcaaaaggaacagcaagacagagaccctgaggctggaaagtcccctatgtatttgcatccgaataaaagccagttttcccagtgacccacagagcccggcactatttgtccacaccaccttcttgatgtcgggatatcccccaccttgacctcatatcctcctcccacactctgctgcagccacaggggcctcctcacctatttcagacactcccacctcagggcctttgcgcttgctgcccctgctgcttggagcactctttcagcagtgatgcatgtggctttttttttttttttttttttgagacggagtcttgctctgtcactcaggctggagtgcagtggcatgatctcagctcactgcaagctccacctcctgggttcatgccattctcctgcctcagcctcccgagtagctgggactacaggcgtccgccaccactcctggctaatttttgtatttttaatggagatggggtttcattgtgttaatcaggatggtctcgatctcctgacctcgtgatcctcccgcttcggcctcccaaagtactgagattatggacatgagccactgcttggctcctgttttaaaatattttttgcgtggggggttttccagtgagaaccagaaaacctgagacaaattctaaaagagctgtaatgtttgacctctttacttaaaatcacaaggctcccttccctcttttattcttttccatatagttatcacctctaacacatgagataaatcatgtaattggctgggcgtggtggcccacgcctgtaatcccagcactttgggaggcaggtggatcacctgaggtcaggagtccaagaccagtctggccaacatggtgaaacctcgtctctactaaaaatacaaaaattagctgggcgtggtggcgggcgcctgtaatcccagctgctcgggaggctgaggcaggagaactgcttgaacccaggagatggaggtttcggtgagccaagatcgtgctactgcactccagcctgtaatcccagcactttaggaggccgagacgggcagatcacctgaggttaggaggagttccagaccagcctggctaacatggtgaaaccccatttttactaaaaatacaaaaaattaacccgggtgtggtggcgggtgcctgtaatcccagctacttgagaagctgaggcaggagaatcgcttgaacttaggaggcggaggttgcggtgagccaattgggccactgcactccaggctgggtgacagagtgagactccgtctcaaaaaaaaaaaaaaaaaaaaaattcatgtaatcatcttccttgttagtctctcacactaggatgtcagctcctgagggcaagggttttgtggtcttgatcactgctgccctccagaggctgggttctcacagaggaggtgtttgccaagcgtttgttgagtggctgcctgacagcacctgcctaccctcctccctgcaggaactcctgcgttgcgagctgtgcctgggcatcatgggtgggaaaccgcgacactcactgtacttcattggctaccaaggtaggcccaccccctcctcactcctcccaccccccaccgcacccccactcacacctgcaccccctgcagatgacttcctgctgtacctggaccctcactactgccagcccactgtggatgtcagccaggccgacttccccctggaggtgagtgggagccccagtgtgtggttggggccatggcgggtgggcagcccagcctctgagccttcctcgtctgtctgccccagtccttccactgcacctcgccccgcaagatggcctttgccaagatggacccaagctgtaccgtgggcttctatgctggagacaggaaggagtttgagacactctgctcagagctgaccagggtgagcaagaggaaagctggagtggggtgaggggggcggttgggcagggctgggggtgaaagaggaacagaggcctcgagtccagcagagctggggtgctgcttccaggctaggggtcctaacctgggaaatgtgaagaatgtccacccctgaaaaggtgggaacgccaaagcccactgttaaggcatcatcccttggaggcagctgtatccaggggctcaagtggtgggaaccctccctgtctcttggccctgctgtccgaccaggactctacccttatgggggcgagagatggccaccagccattctgggcacccaccctgtggtcactggaagggaaacgcaggttttgcagcaaaaatcccaggactgtcagtctttggctgagctgggtcacatgctcatggctgagccaatcactgtggccaggggatggaaggtgctgattggctgctctctcctggagaggtggtcctgagaagcacctactaaataaacctgggctaaggaatatggcttggcactgtttgtggctgaccctgtctccctcttcccgccaggtcctcagctcctcctcagccacagagcggtaccccatgttcaccctggccgagggccatgctcaggaccacagcctggacgacctctgctcccagctcgcccagcccacactccggctccctcgcacagggcggctcctcagggccaaacgccccagctctgaggactttgtgtttttataaagggaggggatgaggggaaagatacaacactatttatttttttatttatgtcatgtcgggtgtgggatcttgagctctggcagtgatgatggtacttcctgttgtcagcccctcaagcccagctgcaaccagtctggggccattcagccagggacagagcccacagagcccatacacctgtctcccaccagcggggccctcctggcagggtagggaaggaggaccccgggcacccccctcagggcctgactcacgtactgtagtttgcactggacgcccgggccctccctgtcccaaagcccccttgggggaactgtggctgctgggggccaataaagctgtgtaacttgatcgtgggtgtggctgggcgcagcgttctgaggggatgtggggtctgggaggtgtctcgaggtgagagctccaagtcacgggaagtttaagtcagcctcagtttccacatccataaaatgggacgacttccttacccacagctacacgtgttttttaatttttttttttttttcaagagacagggtcttgctttgttgcccaggctggagtgcagtggtgcaatcatagctctctgtagcctcaaactcatggccttaagtgatcttccttccccagcctcctgagtagctgggactacaggcatgtgtcaccacattttgtagagatggagtctcgctaagttgcccacgctggtctccaattcctgggctcaagtgatcctttcacctcggcctcccaaagtgctgggattacaggcgtgcctggccacagatgagaggatctctgcagcagatagtacttgtgggtgcgagacctgtccagggcttgatttgaggagaggagcctgaggcccctgcctgctccctggtgctcaggagctgttcttgggcccctgttgtttcctccgctgccggcccagctggcggaagtgcagccgtttggggttgaggccaaaggcctgcagtctctggcggctgaactcgcatccaccaagcatcacagtggggcccagcagccgtgccttcttggccctcctccgcttctggggggctggcttcttgtggggtgatacaggggcttcctcttcctgtgctgggggactctccggccccatcaagctgccatcaagggctggcagctgcctctgtgggccggcttcatctctctgtggcttccctgtggcttccgcaggtgtctctgccctgagggagaaaagtcagggctcagcccaggcctgtcaagatcaggcccattcttgagcacgcatgccccattttacagacagggaaaggaggggcatagtgaagcagccgcacagcgaccgagggcctgcctgggattcagacctgggtttcaggccaaagccagcgcttttctacggaacccaaagactagattgtgaggctgaggattctggtatttgtgcctgggcctgccctaagctagtcacatcaattaactcattttagcctttttcttccttagagacaaggtcttgctgtgtcgcccaggctggagtgcagtcgcgttaccataggtcactgcagcctccaactcctgggctcaagcgatcttctcgcttgagtctcccaaagtgctgggattataggttggagcacacacctggcctcattttagctctaaataaactgtgtgcatctatcacccctgccttctagactgggcgaaagcaatcctaataacagctaagacctatggggcatttaccatatcttaatcactttacgagaattaactcatttcatcctctgcaacttgataaggcagaaccgtctctatctccatcttatgagaaagaggcccagagaggggtagcgacttgcccaaggtcacacaacgttggtgcccatataggattcgaacccaggtctcagagcggggggcgctgcattcccaaagtcatgcaacaagaggttgacggagccaagactcaagcctgggcctgacaggctccccacccacgcttccccagccagcactgcttactcttctcggcagagtgacttgaagacctgccgctttttccatgagttctgggccttctggctgtacgcccgcttgtcccgcagctcctcctgctctgacctgcagacagatgcccctgtgttgggtgctctgggaagtgcccgaggctgcccgccctgccccctgcgcatgtggccccgccgcgccccgccccatcacctgtacatgcaggtcttctttagggagcaccaccggttcagctccttatcgtcagcagcgaggatctgcgtgggaagggagagtggggacctgctgtgatattgcccaggcggggccttccctgagcctaagtcatgtcattagtcaaaacggtaatgccgctaccacccagcagggttgccatgatggccagagacagctgatctctacagaggccaatgatttttgtagaggtcagcagatggggtaactgaggctcagagaacggatccttgccctaggccagatggctgggaagttggctgaattgattccagtttgagcctcagggcccttgagctgtcacccatacccggccatccccaaagcctcagaacgggcaggggtcgctgccaaccaccaggcttcctaattacatatgaaactgtcattcccagcctctaggcctgtttccaaacctactggaaggccatcagaaagaggaagtgattgaatgccgatggtataagcttagtacacatcggctatttttactgaccatgaaaatggtcgtgcaccttcagccgtcatcagtcaggcatagtaggtacccacagcctgccaggtgccacacactttggtctcatttctgttccttccatagtcaccaaagttggggtgctatcaattattgtctcactttacagatggggagttgaggcacagataggggaatcatttgtccaaagactcagctggtgagcagccaagccagggcttgaacccacctaggccccctggttccagaggacaccaagtcttttgttgagacagggtctcactatgtcacccaggctggagtgcagtggcaggctcacagctcacagcagcctcaacctcctggactcaagcaaccctcctacctcagcctcccaagtagctaggactagatctccctatgttgctcaggttagtctcagaactactgggctcaagtgatcctcctgcttcagcctcccagagtactgggattacaggtgtgagccagtgtgaccagccctgctaccaagtcttaccagccagactgctgctaatacatactgacaggaataaaataatattggctgggcctggtggctcacacctgtaatcccagcactttgggaggctgaggcaggcagatcacatgaggccaggaatttgggatcagcctggccaatatggtaaaacttatctctactaaaaatacaaaaattaattgggcatgatggcacatgcctgtagttccagctacttgggaggctaaggcaggagaatcatttgaacctgggaggcggagtttgcagtgagctgagtttgcaccaccgcatgccggcctgggtgacagagcaagacactgtcccaatcaaccaatcaaaaaataaacaaaaataaaaagtaatattggctgggtgtggtggctcacacgcagaatcccagcactttgggaggccaaagcaggaagcttgtttaggcccagggagttcgagaccagcctgcacaacacagtaaaacatcatctgtacaaaaaatatttttaattaaaaaaaattaattgggcatggtggcacatgcctgtagtcccagctacttgggaggctgaggtaggaggatcaattgagcccaggaggttggcaccactgcactccagcctgggtgacagagcgagactatgtctcaaaaaaaagaagtaatatttacggggcgtgccataggtgaggcactgttttaagcccccaccttgtagaaggtagtaatattacctttgaggtgaggtaatgttattagcactgtcattaggactattagcatttctttttttttttttttggcgctctgtcacctaggctggagtgcagtggtgcaatctcggctcattgcaacctctgcctcctgggttcaagcgattctcctgcctcagcctcccaagtagctgggactacaggcgcctgccaccatgcctggctaatttttttgtatttttagtagagacggagtttcaccacgttggccaggctggtctcgaactcctgacctcaggtgatccacttgcctcggtctcccaaagtgctgcgattacaggcatgagccactgcgcccaaccgaatattatcattttcaagatgaagaaacagcctgccatgttgtggcatttctgagcaacagagattgggactcagggccagctttctaccccttcggcatacctggtgccccctgcagtgtccctgcctgcccggggcccctacctcctcagtgctgaggccaaagtcacagggcaccactgtgcggtacttgaagcgacagggcaggtcgtcgatgatgtcctcgtagtccagccggtaatactcatccaggtactcctcgaacgtcttgtcccctgctcgagacagagccaggctgctgggctatgccaggccccgcggtgccccctgcctacccacggcctgcccacctgggcctcaccgggttcaaacacgggcttctcctgccccacggccgcggcgaagggcgacttgcgcttcttcttgcccgtcaagggggcctcgcgctttttcttcctcggctggctggggtcgtagtcggcgtccatctgccaggacgcacaggtcagatcccaccagccccccgtcagggcccctgggactccctcaacccgtgatacctacgttgaagttggggtcctcacagtgcagctcctgctggctccagtctccctcctgctcaggcccgtcccacgtgtcccagttccagtcgtctggatgcagggagaacagacaggtggggccagggtgggaccttgggcttcagtcccagtccccagtccccaatccccagcccagtgccccagctgatctcaccttcaagcccttcttcttcctcaaattgtggcttctcctcctccacggccccgtagtactcgtccccaaagcacttctgcagggtcagggctggcggttaccagagcccactcgagacataggagctgagccccctacgatgccgccaatgaccccctccttggcaactttactcctacagctagggctccctacagccctcccagcacctagctcctgaggtgggaggccctgcatgtccaggatcctccgccaactcccctgctgtctaccctgtgatgtactggccgccattcagttccacatatccacagttcttcgccgtcctacccaccttcgcccctgtggtgcccaccacctggtgcactactcaggccccaggtcttttttttttttgaaacagaatttcgctcttgttgcccaagcaggagtgcaatggcactatctcggctcactgcaacccttgcctcccggtttcaagcgattctcctgcctcagcctccggaatagctgggattacaggcatgtgccaccacgcccggctaagatcttttttttttgagacagcgtctcacccagtagcccatgctggagtacaatggcgagatcttggctcactacaacctccacctcccgggttcaagcgattccctgcctcagcctcccgagtagctaggattagaggtgcacgccactacaccctggctaattttttgtatctttagtagagatggggattctccatgttggccaggatggtctcaatctcctgacctcgtgatccgcctgcctcggcctcccaaagtgctgggattacaggtgtgagccactgcacccggccaggtctttttttttttttaaaacagaggctccctctgtcgcccaggctggaatgcagtggcatgatctcggcttactgcaacctctgcctcccgggttcaagcaattctcctgcctcagcctctcaagtagctgagattacaagcatacaccaccacacctggctaatttttgtatttttagtagagatgaggttttaccatgttggccaggctgatctcgaactcctgacctcaggtgatctgcctgccttagcctcccaaagtgctgggattacaggcgtgagccaccgtggccagtgagagccatgtttgtgtgaactcagcgtcatgttgggccgggatgagggccgcacctgcatgagctggtcgtgctgggcagggtcgaagtcgtcttcaaggtccccctcctcgaggcccagcatctcgttgcctgttactttccgcagcttctccagcttggccagaatctccttcctcttcaggttcttcagctgcttgagctcttcctgcttctttgctttctcctgcaggcccaggcagagagggggagggcatgggctttcctccagggctggggggtcctccccagctcaccccccacactcaccctcttctttcgctcccgagtctcttccctcttctcctttctgcgctcatccttacggcgcacggaggacgcgatgctgcgtgggtaggtcttgacctaggcgcaatcagaaaagcccacaagggccgcagagatgatgtggggttccctgggcctgaaccctgggggctgagtcctccccagccccagccacacaccgatgctgagtccggctcctcgaaacggaaattgtacttctgttcaaagtcctcctgtttcttcagaaacagctccccttcgtctgaggagtcgtccacagccagctggactgggggaccgtggaccctgaggggcaagatgtggtgatgccagggggccagccaagtgaggtcgagcccccctttcctgcacgcctgggtacgaagcgtatgaactcatttaatcctcacaagaaccctacaaggtgcacgctgctattgtcctcattttacagatggggaaactgaggcatgaaagtcttgaagccgaaccaggatttgaggcagtgccacctggctccagagcctatactctgtggctctgccttacagaagactaactctgccaccatctgtgaaaaaaatacacacatggtgccctctgcctcctggccagtgccgcctgggaatacttcatgaagcgcacccaaaatctaggtcctggggagatgcagtggctcacccctcctcttcctccatttcctcttcatcttcctcctcctcttcctcctcctcatagcgtttgttgaggatgtaatcccgcaggaaccgctccccttcatccaactcagggtcgttccagtattccttgagatgcgtctgggggtgacaggagacaggactctggtcaatggaggacagggaaggagggcaggcatgctcaccacatggacctcacagccagcctctggagtaggtgacattagccccattttggtttcttatttttatttcgagacagggtcttactctgccatccaggtgacagtacagtcgtgtgatcatagctcactgcagacccaacctcccgggctcacaagatcctcccaccttagcctcccaagtatttgagactacaggtgcatgccaccatgcctggctaattttttcatttttttgtagagccattttgctatgttgcccaggccagtctcaaactcctggcctcaagcaatcctcctgccttgaccacccaaagcactgggattacaggtgtgaaccacggcacccagcctatccccatttaaagagatgtaggagctgaggcccagagatgtacatatcccatcttcagagggttactttctgtaaataggttggatggacgcggaacacgcggtctactccatcagcgaccatgcgtgagaactcaccagttccttcagggaatctgggttccgaatctctttctgtcccttcagccactcgatgtagtcggcctcctcctgggcctgggggaaagctagcactgagcatccgcagatgcccagccacccgccaccctgtcccccagcagtccagtcaggccccagtacccaccttctcctgcctggttttggcacgtttctgcagcaaactggagccgccctccccagcgccgtcctcgtcctcactgtcctccacaaatgcccggaagctgcccacgagagaaaacaagcctcaggacaggcaggctggcccctgtctgctgccccagtatttattttattttgtagagctggggtctcactatgttgcccaggctgatcttgaactcctgggctcaagtgatcctccctcctctgcccaccaaagccctgagattacaggcatgagccacctcacctggctggctgccccaagattaaccccatttactaagccctgagctctcctctcaacaagctcagagcagtgctgtgatgttattaaccccgtttaactgatgaggaaactgaagcacatagaaagtgacagagctcaatttgaacccgtgcctatccaacccccgagcctcaactttcctccattgggccattcccgcccacccagcctcacctttccttgagctgtttctgttcctccacataactttgcgacgatgtctcctgcagagagggccataggtctcaggccagccccaggcccctcagccccccgacccagccttcaccccacccacctggagtctgtgattggaagtctccccgtctgagttctcctcatcaacatatttgctgtaaaggaaaagtggggtcttcagaatatatcttccagggcccgcctgtccccatgcccatgcggagcagctattccaagcaacagctggcgggggtcatcggagggctatggaatcactgagactcctgctctcagggctatctgcgattctggtgagtttccagcgttttttttttttttttcttttccaatcatgggtgacagcatttcttttttggagccagggtctcgctctatccctcaggctggagggcagtggcatgatctcggaaaactgcaacctccacctcccagattcaagcgattctcctgcctcagcctccccacgtagctgggactacaggcgcccaccaccacatctggctaatttttgtatttttagtagagacggggtttcaccatgttggccagggtggtctcaaactcttgacctcaggtgatctgcccgcctcagcctcccaaggtgctggtattacaggcatgagccaccatgcccggccttttttctttttgagacagggtcttattctgttgcccaggctggagtgcagtggcctgatcatagctcactgcagcctccatctcctggctcaatcctcctgcctcagcctcctgagtagctgggactacaggtacacatcatcatgcccagctaatttttaatttttttgtagaggcggggtatgttgcccagcctggtctcaaacttctgtcctcaagcgatcctattgcctcagcctaccaaagtgctgggattatgggcatgagccaccatgcccggcccaggctgccagcttttttccctctcctgcccctaagacccccatagacctgacagggctgggaaccagggggtggggatgtaggccttctccataccctgccttctccaagataaccttcctctcgtagtccttcaggtacatgggccgcactttcttctgcttctccaaggcttctgggtcctcctcactgtctgatgacgatgctgttaacccaccaaagacacctgccatcacccacaacccccttctttgccgtggcagagaatcccacagggcagggccagggttagacagaggattcaaatcccaaatccaccaattcccagctgtccaagagtattgtgcttgtcaccatctggtggggttggggtcattcagtcagtaattcctgctttgattattattattgttgttattatttatttacttatttttttttgaggtggagtctcattctgttgcccaggctggagtgcaatggcatgatctcggctcactgcaacctctgcctcccgggttcaagctgttctcatgtctcagcctcccaagcagctgggattacaggtgcccaccaccgcgcccggctaatttttatatttttagtagagatggggtttctccatgttggtcaggttggtctcgaactcctgacctcaggtgatttgcctgcatcggcctcccaaagtgctgagattacaggcgtgagccaccgcacccggccattattattatttttttgagacagagtctcactccgttgcccagtgcatggcgtgacttggcttactgcaacctccgcctcccaggttcaagcgattcccctgcctcagcctcctgagtagctgggattacgggtgtgcaccaccacgcccagctaatttttgttatttttagtagagatggggtttcaccatgttggccaggctggtctcgaactcctgacctcaagtgatcctcccgcctcaacctcccaaagtgctaggattacaggcatgagccaccatgcccagcctgattaattattataattaatttttttgagagttggagtcttactcttgctcaggctggagtgcagtgtcaacatcctagcccacagctcactgcagccttgaactcatgggcttaagcaatcctcccacttcagcctcccaaatacctgggactataagcgcacaccagcatgctcagctgagttctgaatcttttgtagagatggggtcttgccgccaggcacagtggctcacgcctgtaatcctagcactttgggaggccaaggcggatggattacctgaggtcaggagttcgagaccagcctggctaacatggtgaaaccccatctctactaaaaataacaaaaaaatagctgggcgtggtggcacgcacctgtaatcccagctactccggaggctgaggcaggagaatcggttgaaccggggaggcggaggttgcagtgagcccagatcatgccattgcactccagcttgggcaacaagagcaaaactccgtctcaaaaaaaaaaaaagaaaaaagaaagaaaggctggctgggcgcagtggctcacgcctgtaatcccagcactttgggaggccagggtgggcggatcacctgaagttgggagttcgagaccagcctggccaacatggagaaaccctgtctctactaaaaatcccaaattagctgggcgtggtggcgcgtgcctgtaattccagctactcaggaggctgaggcaggagaatcgcttgaacctgggagacggaggttgcagtgagctgagatcgtcccattgcaacccagcctgggcaacaagagtgaaactccatttcaaaaaaaaaaaaagagaaatggggtcttgctatgttggccaaactggtctcaaactcctggcctcaattgaccctcccacctcagcctcccaaagtgctgggattagatgcttgaaccacctgcccagcctggtggagttggaatcattcagtcagcaattcccaccttgaatagtgccaaggacacagtcattaactccaccaccaggtaataacctaggctctgctaaggacttgtgacttgtgaagcaattcattcaatagtcaaaacagatgaactgtgtaaactgggtaaatcccaatctatccttaaaacagccctgaggggagatgctaccgttagatatactttacagacaggaaaagaggctcagagaagtcaagtcacttctctgaatccacagtcaggaaaggaccccggattctgctccagaggaaggagaggtttagacaggagtggccccggacctgttctgttatagaaggtggcatctttctgataaatgcgggggtccttcttcttcaacaaggagagcgttttgtaaaagtcccgctcctgctggggatcaaattcctagggcaggaaaagggttggggatagatttcagaagggagataataagagccctggcgccagcaggtgagctcagcgtagggattaggatggaggggggtggatctggctggggaggtcaaacaggtggtcaaacagcaggagggagaggggccctcttggggtgggcaggggcaggccacaggtaggtacaggatatgggtagaggaaggtgaggggcaaggagaaggtaattcctggggaagacaaagacttgacaaggggcaggtgggctgagggcacaagagagacagcggggaggggctgggccaggccgcacagtggggccaggatcagggctgatgtgagaagttgggcgccccacgtggcgcaaggagtacactaaaaaatggctagactcttgaggatgaaagaggaaagggggggttcttgggggacagagtcgccccacacatcagagtgggcaggtggggatcgtggcaggggagagaaaataacggggatttggctcccctggggagagggggggcactgtctgtccctcatgggatggggagcggaggatgggacgctcccgcagggcgctctggggttgggggttcccccccgtctacatcggggtcggggtgcagaggggggcttggacgcctccgcacgtccaggacggggcggggacgcgcaccacgcgctcgtcgcttgagtccgactcggagctggagtcgctgctgctgtctcggtccccgtagcgatccttcactgcgggacacagacgggatgcccccccccaggtcagccggcggggccactcgactccccacttcccaaccggccggcgcgcgcaggctcccgcgcgcatgcgccccgcactcacgccgctgcagttcctcgcgctcccggtagcggttgtaccgcgcggcaaacgccgcgttcacccgcagctgcgacgacccgcgcggttccggcatggcggttctgtggcccattgcgcacgcgcattgaggaagccctggacggggcggggccgccctcagtcccgcccgcatccacttgtaaacgaggcgtaccgctgctaaccccgcccctggcttttccgggatccctttcgcctcatcaccgcagtcaccgcccacggctacgcccctgcggggaaggccgcggccaccgcccacccgccccaccccctgtgctccgggcacccagctgacatctgggggccctttctccactcgcggtttcctgcttcccttccgttccgacagcgaaaaccgctgccccacccagctcactcaccctggcgccctgggaattactattctctcccctcacccaccacatccacgatccgcgacccccgtcctcatccccatcaacatccgggatgtgtaactctccatcccagactcaaaaatcagaagccacccgtgctgtgatcatgcacaagtcttaatttaatgggtaaaaacattaaattattacaacattttttccaataaagcataataaatagaatccatttcttttaaaacgctgtacaagagactggaaaacaagcttccaacagaatatgaataactcataactcattctaccttcttattgatttgggacgctccccccaccccccatgcctgaagcaacgtgcacacttcaggtctctgagcacagccggccaaggccaccagcttctaggctccctggaggtcatgacttcactcttaaatgctctgcccttgggtctcgtctgaggccccagcagcctgaggcgcagaagaaactgaaccgtttaggtggctgtggcctgcaggagcccttctctgtccaacacaccaaaaggagtgagaaaaacaaatgagaaacgtcccccaaacactcacacccccaaaaccaacacctataagccacaaactgtgctcctcccctactgcagcagtgggcaggagaaacaagaagagaaagtgtttcttcccctctcttctgatacataaccccacggggttctcttgctggagagggtgaccccagatcacagcggggccaccatgtggccctgcaggatgtccacgaggtcctgagcccctctctgcagtgccagctccaagggtgtgagacccctggcgtccctgcgatggagatcagattcagctgccagaaagctgaccacagcagtgtgaccctcttgaactgccagatggattggaagtgccccggtgccatcaggcacgttgacatcagccccgtgctccactaggaccttcagggtgtccaggaatccagtgcgggctgcgtcatggactggactggtaccggaggtgtcctggacattggggctggcaccttgcttcagcagctccagggcgatggcggtgctgccaaacatcatgacctgtgtgagggacagaggatcaggaggtcctcaagggaggaggttccacaaaaggggtcactggaaagagaagggtcatccagaaagaggcatctcccagaaacaggaaatgctagaggaggggtcctctagtgaacggagaagctgcataagcccccaggaaagttcttctgggaatagggaccccccccaaaagctggtcactcccttaagaatgagaccccccaacccagagaacagccccccatggaaactttcaaggaacctaagactctcccccaagggaccaaagacgcccccagatatgggcaatcaccaggaaacagaaaatcccctccaggaaatgggcccccagagatggagaactacccccaaagaattgatagtcctcataagggaaaaaagatgtcaaaggaaagcgaaccccttctccaggaaatagcctcctcctacataatggtgatgtcacctcagagtacctgagagctcctttcaagaagcgggattccaaaagtaataataaaagagaaacgagacttccctgtaaaatgtctcccagggaatatagggatgtcttgcaatctgacattgttcctccattggggcccccatactatatcaaggatccgcataacctttaggaatgaagaccccacccccaagtaaccagatttgtctcagagagccccctacaaaatgaggaacccctagagacaggacctctccttccagagatcggatctccccatagaagccccaagaaacgtgagccgtccccatggaaacggcatccaaaggagctgaacccgcacccacggaataagaacctccccagggaaagtgaatccccggcactcagagaaccaggaatcctcccagagaagatgctaaaaagctctcccctccccccacaacctagcctcacccaccacccaccttcgaagggggactgtgggggaacaatgaaagcctagagaagaaggaccggttcccagtgggtcaccaccagggccaggagaccagagaggagctctggggtctcgatcctcatcccgcttagccgccccgccccaacctggaccggcccggcctcacctgcagcgccgtcttgccgaagcggttgagggcgtcgggatgcaccagctcccggtgcagaaggcggcgcacctcctgcacgtcgccccgggccgccgccccactcagccggtcgccggcgcgaacctcctccagcagcatgtcgacactggcggcctgcaaagccccccgccccgccccagcccggcgctgtcagcgcggagcagccggcgggcgctggcccgaacagccctcccggggcgcggccgcggtgcacccggctgcgctgctctcccgtcccggctccccagcccgagaccccggccctcccggcgggctcctccccctgtcagccggaggacggcgaggggctgggagccgggcccaaccctcggccgcccgcggggccctgcccggcgcccgccccttgggggccgggtctccccctaactcaccctccctcctcctcgccgggcggggtctgctctgagcctgcgccgccgccgccgctgaggcagccgccagggggcggagccaacgtgctcccggccacgccccgaacgcaactgatttgttttcttacaaactcgctactgtgtagcggcaccgcgttgcccggcgcgcgaccttacggcgttccgcccacagggcctgcataaccagtggctgcgcgtcgccggggaaacttcgggctcggcgtgaaacgcgtcgctcctgattggtcagagtgtggcaaccggtggaccgccggcaatggcggggttttcggttttcaaatgaacccggcaggcgggaaagaaggctggtttaactgacccagggagaaaggtcaggggcagggtcgcgcgggctgctctgggacctcggcgcctcctgagggaagggaggcagggctggagccacccaatccgaggttccactactaatagacattcattggcccttactacgagctgggcgctttatttcattcatttattcattcactgtgtgcagggagcgtcctgggagctggacgcgcacattcaaacaaccaaataatattagatagtgtcaagcaccgtgaagaaagggaaacggagagacggagtggatgaggaagggatcaccctgccgggctcagactgagccagcaggaaaggagcctgcagctgccacgtgggaaggcctgagaggacatagtcgcagccagacagggactcagaggtcttcgttcaaatatttacttagcacctcctagaggggcccgagtggagagcacgccagtcggcccctgctgcagggacacctatggtctggggccagagacaatagttaatttttatttatatatgtatttatttttgagtcagggtctcactcctgtcacccgggccggcgtgcagtggcgcgatcacagctcactgcagcctcgacttcccgggctcaagtgatcctcctgcctcagcctcccgagtagctgggactacagggcgcaccaccacgcccggctaatttgtgtttttagtagatatgaggtttcactatgttgcccaggctggtgttttttgtttgttatttgtgtttggcttttaaatacagatttttttttttatgttggggttcttgctttgttgcccaggctggtcccgaattcctgggctcaacggatccttctgccttggcctccaaaagtgctgggattacaggcgtgagctcctgctctccgccaatagttaaatctttttagagtggtagaggactgaccagatgagccattgaaacggaaaggcaaaaagccgggcgcggtggctcacacctgtaatcccagcactctgggaggctgaggtgggcggatcacgaggtcaggagttcaagaccagcctgaccaacatggtgaaaccccgtctctaccaaaaatataaaaaattagccgggcgaggtggcgggcgcctgtagtcccagctactcgggaggctgaggcaggagaatggcgtgaaccccagggggcggagcctgcagtgagccgagattgcgccactgcactccagcctgggcgacagcgagactccgtctcaaaaaaaaaaaaaaaaaaaaaaaaattagctgcgcctggtggcacgcacctgtaatcccagctactcaggaggctgagacaggagaatcgcttgaacccaggaggcggaggtcgcaggagccgagatcgcgccattgtactccagcctgggcaacagagtgagactctgtctcaaaaaaaaaaaaaaaagaaaagaaaagaaaagaaaaagaaacgcaaaggcagggagggcctccctgaagaggtgacatttgatttgagacctaaaggtgagggagggagacttgtggttatatggggaaaagcacaccagctgggaggcacagcagatgctaaggcccagaggtgagagcgtgcctggtgtggtacagagcaggggagagcaggtaggtggggtatcaggatggcaattgtgcaaatcaagccatggcttttttatttatttatttattttaatttttttttaattttttttttgagacggagtctcactcgcccaggccagagtgcagtggcgctatcgcggctcactgcaagccccgcctcccgggttcacgccattctcctgcctcagcctcccgagtagctgggactacaggcgcccgccaccgtgcccggcctttttttttttttttttttttttttgagacagagtcttgctctgtcgcccacgcccgaccaggccatggctttaataagataggaatgccgagcgaagtggctcacacctgtaattccaacattttgggaagctgaggcgggtggatcacctgaggtggggagttcgagaccagactagccaacatggtgaaatcccatctctattaaaaaatacaggccgggcgcagtggctcacgcctgtaatcccagcattttgggaggccgtggcgggcggatcacgaggtcaggagattgagaccatcctggctaatacggtgaaacaccgtctctactaaaaatacaaaaaattagccaggcgtggtggcgggcgcctgtagtcccagctacttgggaggctgaggcaggagaatggtatgaacccgggaggcggagcttgcagtgagccgagatcacgccactgcactccagcctgggcgacagagcaagactcttgtctcaaaaaaaaaaaaaaattaagccaggcgcggtggctcacgccggtaatcctagcactttgggaggccaaggcgggcggataatgaggtcaggagtttgagaccagcctgaccaacatggtgaaaccccgtctctactaaaaataacaataattagtggggcatggtggcgcacgcctgtaatcccagctactcagcaggctgaggcaggagaatcgcttgaacctgggaggtggaggttgcagtgagccgaaatcgcgccactgcactccagcctgggcgacagagcgagactccgtctcaaaaaaacaaaaacaaaaacaaaaattaagccaggcgcagtggctcatgcctgtaatcccagcactttgggaagccgaggcgggcagatcatgaggtcaggagttcgagaccagcctggccaacatggtgaaaccggtctctactaaaaatacaaaaattagctaggtgtggtgatgggcgcctgtaatcccagctactcgggaggctgaggcagaagaatcgcttgaacccgggaggcggaggctgcagtgagccgagatcgcaccactgcactactccagccttggcgacagactgagactccgtctcaaacaaaacaaacaaacaaacagacaaaaaaagccaggcgtgatggtgggcgactacgactataatcccagctactcgggaggctgaggcaggagaattgcctgaacctgggaggcggaggttgcagtgagccgagatcgcgacactgcactccagcctgggctacagtgagactgtctcaaaaaaaaaaaaagaaaaaagaaaaaaggaaaaaagaagcgatgctaacacgcgccctctagcggctactgggggaacagaccgtggaggtgggaagcaaaggcaacagcagaggaccagggccatgacccgggactgaggaatggactgacacgtgttacccactcccattgcagcacttcagtaatgtccccaaacaagcacataggcagcggctagattcatctttttaatgacatcctaaaattcagaggaggggccagcgggacctctgggctcagcggctgtgaaggagggacccgcaacacccgctaaggcaggtaattgcaagaaggcactcgcgaggaggacttcaagcccctcttctatttcttcatataaaatcagggggatggggaaagctccaagggcgagggaagcagagagagtttctctcccagcctatggaataaggaagaggtgaggaaggggcgggtgctgggagcaagaaactgccaagtccaggacctgccctcacacagacacacacagcccgcacctgccctccctctaaaatctgcatccggggctgtaaggaagccccgtgttcaagcccccatctcttctcccttctagctggtacgaagttggtaatctgcagagaaagaatgaggaggggccatctcagaaatggggagaggggggccgggcacggtgactcacgcttataatcccagcactttgggaggtcgaggcaggtggatcacttgaggtcaggggttcgagaccagcctggccaacatggtgaaaccccatgtctattaaaaatacaaaaattagctgggtatgatggtgcacacctgtaatcccagctactagggaggctgaggcagaagaattgcttgaacccaggaggtggaggttgcagtgagctgagattgcgccactgcactccagcctgggcgacagagtgagattccatctcaaaaaagaaaagaaatggggaggggtgaaggaagagggacagcctcccacagcccctcaattcatcccctatcccagcactcatgatcaacaaggctaagaatggggctaaacacaggtactgtaaccatagaaacaaggcagtttccaggcagcagatggaggtgctatatgttcagccccttctccaaactcgcgaccaccctagaactgacgctgacaactgtccctgcttttttttcctttttttttttttttttttttgagccagggtctcactcttgcccaggatggagtgcagtggtgcaatcacagctcactacagcctcgacctcctgggctcaggcgatcctcccacctcagcctcctgagttgctgggactacaggtgtgcacatcacacctggctaatttttatattttttgtagtgaaggggttttgctgtgttgccaaggctggtctggaactcctgagctcaagcggtcctcccacctcagcctcccaaagtgctggaattacagatgtgagccaccacacccagccaactgcccccattttaaagacgtgcaaaccaaggcccagggtgccatgacaagaaggggcagtttgctttctttttcattttttgagacagggtttctgtcgaccaggcaggagtgcagtggcacgatctcagctcactgcaacctccacctcccgggttcaagcaattctgcctcagcttcctgagtagcttggattataggcatacaccaccacacccggctaatttttgtatttttagtagaaacagggtttcaccatgttggccaggttggtctcgaactcccggcctcaagagatccacccgccttggcctcccaaagtgctaggattacacacctgaaccatcacacctgacccttgttggttttctgagccagaatgtggtgaaagcctcgagtccctacccactgcctttccctcaccccattgtccccaggagctgggctgccttaccgccactctgggtgatgtagcgaacccagggcagggcctggtaaccacttttctcaatgatcttcatgtatcggacctggaagggaatgaaaagaggtggtccaggattgcaggagggaggaggccagggccagggagaaagagacggcttaggccaagcggctatgtggcacaggctgggatcgatgaggggatatcacatggtcttagggggatgaggtggcacaggcaacggaatggtgaatggctttggaggtggagaagggacagaagtgaacaagccggtggggaacaaggtggcacaggccgggggagagggagcacaggctgtgggcagataaaggtaacattgctctgggaaagaccaggcagccttcagaggagtgttgacacaggccaggggactgaggtgactcgagccaagggacaggagagaggggaacccaccgaagtcaaggggaggatcctccctgcctgcttctctcacctggatcccagagacggtgaagtaggggatctcaaacttgaccccgatggggggccggccctccacctcttccttttccacactggggaggccaaagtgggctcgcatcaagtactccttgcccccctgagggaacatgggggcatcaggtacacgagggtccgcctaccctcccgagaccttcctttcagcaacccctggagtcagatctgctcacagcccatttcacagacaggaaaataaaggctccttagcctgggcaacatattgagataccatgtctacaaaaagtttaaaaattagctgggtgcggtggaacatgcctgcagtttcagctacttgggaggctgaggcaggaagatcccttgagtctgggagtttgaggctgcagtgagccatgatctcaccactgcaccccaacctgggtgacagagactcaccagggaagattctgactgcaaaacccaatcagggtttttttctttttttaactaccatgtcctgttttacaggcactgatgatccacctctcccaagatcatggggacaaaccaaaacctctagtagccaagggatgtgggtcacctcatcctgcccatttcacagacaggcaaactgagcctccttaagtggaaatgggtttcccaaacccacccagctcagcaaagcaatagtgaggaaggtgaacccagggctggtttcctcaagacattggcagggggatatttaaatccacacacttcccgtcatggaagtttacacgtctgtgaaatagactggcctggtttcaagcttgatcacttgcatacatacgtacctctctgatttacttgtatttcttttttctttttttttctttttttttctttttttttttttttgagatggagtcttactctgtcgcccaggctggagtgtagtggtgcggtcttggctcactgcaagctccgcctcccaggttcacgccattctcctgcctcagcctcccggtagctgggactacaggcgcccgccaccacgcccagctaattttttttttttttgtatttttagtagagacggggtttcacagtgttagccaggatggtctcgatctcctgacctcgtaatctgcccgcctcagcctcccaaagtgctgggaattacaggcgtgagccactgcgcctggccttgtatttcttttttctaagtttttttttttttcttgagacagagtttcactctgtcacccaggctggagtgcggtggcgtgatctcaactcactgcaacctccgcctcccgggttcaagtgattctcctgcctcagcctcctgagtagctggtactacaggcgcacacccccatgcccggctaattttttttttttttttttttttgaaatggagtctcgctctgtcacccaggctggagtgcagtggcgtgatctctgctcactgcaagctccacctcccgagttcaggccattctcctgcctcagcctcccaaatagctgggactacaggcgcctgcaaccacgcccggctaattttttgtatttttagtagagatggggtttcaccatgttagccaggatggtctcgatctcctgacctcgtgatccgcccacctcggcctcccaaagtgctgggattacaggcgtgagccaccgtgccctgccctaatttttgtatttttagtagagacgggttttcaccatgttggccaggctggtcttgaacttctgacctcaggtgatctgcccgcttcagcctcccaaagtgctgggattacaggtatgagccaccatgtctggccttttaatcttttttttttttttttgagacggagtctcgttctgttgcccaggctggagtgtgcagtggcacaatctcagctcactgcaacctctgcctcccgggttcaagcaattctcctgcctcagtgtcccgagtggctgggattacaggcatgcgccaccacacccagctaatttttgtacttttactagagacggatgttagccgtctctatgttagccaggctgggatttcaggcgtgagccactgcgcccagctcctcttaatatttttatagaggcagggtctcactgtgttccccaggctggtctccagctcctgggttcaagcgatctgcccgtgtcagcctctcaaagtactggcattccagtcatgagccatcacacctgactgggtctctgatttgttctctgccttgttctcatggctcctgggcagcccccacactactccagtcccctccacccccagatcccccgccagtccctggtacttaccgggaaagacttaatactccaaatcacgacgtttctctccggcacatacttggcgctgcccacactggtcttgaatctgggggagtcggcatcgctgggtacaggcacagatatctccacaccgttggccactgactgtttcttaaactgccccttggcctgtcaggggagcgagcatggggcacgaagaattcgcttgctcatccttcaaatatttaccaagcccttttttttttttttttttttttttttttgagacggagtctcactctgtcgcccaggctggagtgcagtggcgcgatctcggctggctgtaagctccgcctcccaggttcacgccattctcctacctcagcctcctgagcagctgggactacaggcacccgccagcacgcccagctaattttttttgtattcttagtagagacggggtttcagcatgttagccaggatgttctcgatctcctgacctcgtgatccgcccaccccggcctctcaaagtgctgggattacaggcgtgagccaccatgcttggcctttttttttttttttttttttagacggagtctctctctgtcacccaggctggagtgcagtggcacaatctccgctcacggcaacctccgcctcctgggttcaagcaattctcctgcctcagcctcccaagtaggtgggattacaggcatgtgccaccacgccctgctaattttgtatttttagtagagacagcgtttctccatgttggtcaggctggtctggaacgcctgacctcaggtgatcctactgcctccgcctcccaacatgctgggattacaggtatgaaccactgcacccagcctgaaggggtcattttgaatcaggcaaaggtgtatggtgctgtccacatggaaggcaccaagaacagggcttctcgagcctcatgggtgtgggcctgagttctaacagttgttggctgtgtatctgcaggcaaatgccttaacttctgtgtgcctcagtttcctcatctgtaaaatggacaggataagggtccccaccttaggattgtggaggcctgggctgagagggcatatgaaaggcttgttgaaaaaagccgggggtggtgggccacacctgtaatcccagcacttggggagatggaggcaggcgtggcggcaggagcctgtaatcccagctgctcgggaggctgaggtaggagaatggcatgaacccaggaggcagaggttgcggtgagctgagatcacaccactgcactccagcccgagtgacagagggagactctttctcaaaaaacaaacgaacaaacaaacaaaaaaacccttcagtccatcacaggagagttattattttatttgataacagattttttttttcttttttctttttggagatggggtctagctctgtcatccaggctagagtccttgtctcactacaacctcctcctcctggactcaagcaatcctcccacctcagcctcccaactaactggcactacaggcactcaccactttaccaggctaatttttgtattttttgtagaaacagggtttcgccctgttgcccaggctggtctcaaagtcctgggcttaagtgatctaaccaccccggcctcccaaagtgctgggattacaggtgtgagccaccgcacccacccgagatcatgcattgttaataagcattcccccaaggcccaccttgaccatgatctccacgcggctgtgggagaacttctcaatgacagactcaatccagatcagtggcttgacctgtgggaagaagaaggggagagttcttggagactccatgttgactctcttctttttttttttttttttttctttctttgagacagagtctcgcttcttcgcccaggctgaagtgccatggcgtgatcttggctcactgcaacctgcacctcctggactaaagcaattctcggccgggagcggtggctcacgcctgtaatcccagcactttgggaggccaaggtgggcggatcacgaggtcaggagatcgagaccatcctggctaacacggcgaaaccccgtctctactaaaaatgcaaaaaattagctggacacggtggcatgcgcctatagtcccagctactcgggacgctgaggcaggagaatggcgtgaacctgggaggcggagcttgcagtgagccgagatagcgctactgcactccagcctgggtgaaagagccagactccgtctcaaaaaaataataataataaaaattaaaaaaaacaaataaagcaattctcctgcctcagcctccccagtacctgggattacagcatgtgccaccatgcccagctaatttttgtatttttagtagagacagggcttcaccctgttggccaggctggtctcgaactcctgtcctcaagtgatccacccgactcagcctccaaaattgttgggattacaggcgtgagccactgcgctgggcccagggtcgctcttcagcctaccccaacctactccacccagatggggctggaccctgcctcacctgggtgctgaggcggtatgacatgagctcaaagtcaccatcaggcgggatgaaggagatggtgcggtcgttgtcaaagcgagagagccgcacgcactggtggaattttacatcctccagctctactgatttgttcttgctgcctgaaactcagagtggagagtggagagtgaccctgggaaccaggaaaggatccctatccccacctttcctgccgaccactgtcacctatttcacatatggggaaactggggcccagagagaatgagcaaaaactggcacagtagagctggaatctgaacctagtatctgtacaggatctggcttggtttttttttttttttttttttttttgagacagagtttcactcttgttgcccagactggagtgcgatggcacgtcttggctcaccgcaacctccacctcccgagttcaagccattctcctgcctcagcctactgagtagataggattacaggaatgtgctaccacccccggctaattttgtatttttagtagagacggggtttctccatgttggtcaggctggtctcaaattcccaacctcaggtgatcctccctcctcggcctcccaaagtgctgggattacaggcgtgagccactgtatacccggcagtgtctggcttttaaatatgatgctgaggcctggcgtggtggctcacgcctgtaatccccgaactatgggaggctgagatgggcggatcacaaggtaaagagatcgagaccatcctggccaacatggtgaaacctcgtctccactaaaaatacaaaaaaaattagctgggcgtggtggctggtgcctatagtcccagctactcaggaggctgaggcaggagaatagcttgaacccaggaggcggaggttgcagtgagctgagatcatgccactgcactccagccgggtgacggagcgagactccatcttaaatcaatcaatcagtcaataaataagatgctgagccaggcacagtagttcacacctgtaatcctagcactttgggaggattgcttgaggccaggagtttagaccagactgggcaacatagcgagacccccgtctctataaaaaatttaaaaagtaggtggtccatgcctgtagtcccagctactcgagaggctgaggtgggaggatcagttgagcctcggaggtcaaggctgcaatgagctatgatcacaccactgcactccagcctgggtgacagagcgagaccccatcccaaaataaataaataaataagatgctattctgtctcctcctcccagtaggatgtcatctctgtaagaacgcgggtttgtctttttcttcactgctgtgtcctcagagcctaaaactgcacctggcacccaatagtcgctcaatcatgaaacagcctttgcagtcagccaatggctgcaatactggccgtgatcagcagatggtgagcgagcgcttatttcaaaacgggctgcgattctcttaagtccccacgtggggcgggtttgcgactcccctgtgcatttctcagaagaaaggtcccctaaatgcttacggccagtgagctcgaagagcacgcggtcattgaggcccagccgcagctctggcattcctgacagaaacaccttgagcttgatggtaccgacgatttcgctcagaaggacgctgccgttggcattgacctgagggaggacgttgggtatagttagcaggcatcaaactccgtctcctgcagccaggccgtggaaggggtgccggggaggtgtgcaggctcaccagcaggttgacagactctatgacatcaatgaagacctcgttcttcttatacttgataccctcggagcgccaggacacagcgttggtgacagtgggtggcacccgtgacttgcccgtctccagcttgttgctctgctgagtgatgtacctggagggagggcggcagggacaagcagctggacccagggacacctccgtggacctcctccagttccttacacccacagtccagcccatggctgcctccaggggtccactcactcctgcaggatcttgctgtcggtggtctgcgggaagccaaagtccatgagctcgtccagcaactcgtagacgatgacaaagttgtcccggatgctctcctcctccagctccttgaagtattcgcagaatacctgggggttggaggagagagagacccacaaaagtgtggctatgggttgggcatagtagctcatgcctgtaaccccagcaccttgggaggccaaggcacgaggatcacttaaggtcatgagttcaagaccagcctgggcaatatagtgaacccctatctcgttttttcttttttcttttttttttcgagacagtctcgcactgtcacccaggctggagtgcagtggcactatctcggctcactgcaactcctgcctccggggttcaagcgattctcctgcctcagccttctgagtagctgggactacaggcacgcactaccagggccagctaatatttgtatttttagtagagacggggtttcacaatgttggccaggatgatctcgatctcttgatctcgtaatccgcccactttggcttcccaaagtgctgggattatggcatgagccaccggtgcccggccatgagcccctatctctaacaacaacaacaaaaattttaataggagttcgaggctgcagtgagccatgaggatgctactgcactccagcctgcgtaacagaataagcccctgtctcaaaaagaaaaaaggccgggcatggtggctcatgcctgtaatcccaacaatgggaggccaagggaggcagctcacttgaggtcaggagtttgagaccagctggccaacatggcaaaaccccgtctatactaaaaatacaaaaattagccaggcatggtggcacctgcctgtaattgcagctactagggaggctgaagcaggagaatcacttgaacccaggaggtagaggttgcagtgagctgagattgtgccactgcactccagcctgggcaacaaagtgagaccctgtctcaaaagaaaaaacaaaaaagaaaaaagaaaaagtgtactgaatgcttgaaaaattaggcaaaaaagggcaggtatggtggcttctttttttttttttgagactaagtctcacagtgttgcccaggctggagtgcagtggcgagatcttggctcaccacaacctctgccttccaggttcaggtgattctcctgcctcaaccttccccgtagctgggattacaggcaggtgccaccatacccggctaatttttgtatttttagtagagaaggggtttctgcatgttggccagcctggtctcgaactcctggcctcaagcaatccgcccaccttagcctcccaaagtactgggattacaggcatgagccactgtgcctggcctttttctttttttttttaagcacagagacaagaagtcacttgctcaaggtcacacagtgaggaagcagggaagctgggattggatgccaagtccttgggcttagctgagccgtatgctctctgagacattcttggtccctgtcctttagggagagatgacttcataagcagctgatgagatgcagagtgatggggctttgatggcggatgcacagagactcaaacaaggccccagggaaggggtgagcgtggtggctcccatgctttgggaggccaaggcagtaggattgcttcaatccagaagttctagaccagcctgggcaatatagcaagaccccatctctaccagaaaaaaaaaaaagggaagacccagggagatctgggaaggcttcctatcagaaaaggatcttgaatcttgaaagaggcgggcaagagggatagacggatagaccagttagccaatgggaggctagtacctacctctattgtcttatacaggaaggagtacaccagggaggcattggcattcttcgatgtggtggccaccactggggcagcaaggttaaggaaaaggtgccatttatggagaagtaaatggaatacagaccccgaacctccaccctgtcccttgccaccaccctcatctctacctgcccctgccccccagcctaagccacagagatgtgcggtgcaactcctgtcctcagcccaccctctcttggcctgagctgccaccatcgccgacagcccccacacccacctccagggacaccacgtggggtggatacagtagaggttgctgtgtttgatccataggaagtggacctggccgtggctcagcagcggggccagggcgccttcctcctcccgctgtaccagcaaaggcatgaagtgctcaatcttgctcatggccacatcgcccttgtagttgcggctgatcaatggctgagggtggaaggaaaggacctggtcaccaccagcatccaagaacctaccacgctgaggaggcacagtgcccggttctgaccctacttcctagctgaggggcttgggcaaggctctgcctccttgtgcctgtttcctgctctgtaaaatgggagtgtgatgacaacagctaatgggtctagggccctcactaagtgccaggctgtgttttattaaagggtaggcgatggctggacgcagtggctcacgcctgtgatcccagcattttgggaggccgaggcgggtggatcatgaggtcaagagatcgagaccatcctggccaacatggtgaaaccccgtctttactaaaaatacaaaaaattagccgggcgtgatggcgtgtatctatagtcccagctactcggggtgctgaggcaggaggatcacttgaacctgggaggcggagattgcagtgagccgagatcgtgccactgcactccagcctggcgacagagcaagactccatctcaaaagaagaaagagagaaagaaagaaagaaagaaagtaaagaaggaagggaggaagggaaggagggagggtaggagggaaggaaggaaggaaggaaggaaggtaggcaggcaggctggctactaaaaaaagagtagatgtttactaacttattagttcttgccacaaccctgtggggtagatgttatcatcatctccatttcacacaggagaagtgaggttagaaaccatgtccactggaagcatatggaaactggggattgatctaaggcatcctgggtccagaatccctgctgttgccccagacttcatttgcaccaaagtgggattatttaaaaaaacaacaacaacaaaaaaaaaaaacaaagaagaggccaggtgcaatgactcactcatgaagaccaaggcaggaggatcccttgaggccaggagtttgagaccagctttggcaacatagcgggatccctctacaaaaaatttcaagaattagctgagcatggtggcctgcacctctgtagtcacagctactctggaggctaaggcagaagaatcaattgagcctaggaggtcgagactacagtgagctgtggtcatactactgcactccagcccgagcaacagagtgagaccctgtcaaaaaaagaaagaagaaaagaaagaaagaaagaaggaaagaaggaaagaaggaaagaaagaaagaagaaaaaaagaaagaaagaaagaaagaaagaaagaaagaaagaaagaaagaaagaaagaaagaaagaaagaaagaaagatgacagttcatatgattgtgcctggtagtcaggaagacacccataatagtaaacacttctgtctggacacggtggctcacgcctttaatcccagcactttgggaggctaaggcgggtggatcatgaggtcaagagttcgagaccatccaggccaacatgatgaaaccccgtctctactaaaaatacaaaaattagcttggtgtgctggcgcatgaccgtaatcccagctactcaggaggctaaggcatgagaatcacttgaacccaggaggtgaaggttgctgtgagctgagatcacaccagcctggtgacagagcgagactccatctccaaaaaaaaaaaaaattagttaaccacttcctaaggttgttttgtccagtgtctgaacagggaggacccatggcaggttctcaaacatcttagctctcactattaatattaatgggaatattattttcaccaccactcttattttggctattaaatgacaagacaggctgactgcagtggctcacacctgtcatccgaacactttgggaggctgaagcagggggatagctggggaccaggagttcaagaccatcctggacaacatagcaagactccatctgtacaaaaaaataaaaataaaaaataggccgggtgcggccgggcgcagtggctcatgtctgtaatcccagcactttgggaggccgaggtgggcggatcacgaggtcaagagattgagaccatcctgcccaacatggtgaaaccccatctctactaaagatacaaaaaattagccgggcgtgatggtgcgcgcctgtaatcccagctactcaggaggctgaggaaggagaatcacttgaacctgggaggtggaggttgcagtgagccaagatcatgccattgcactccagcctgggtgacaaggcgagactctgtcttgaaaaaaaaaaaaaatacaaaaattagccaggcatggtggcatgcacctgtagtcccagctactcgggaggctgaggcaggagaattgcttcaacccgggaggtggaggttgcagtgagccaagatggagccactgcactccagcctgggtgacagagcaagactctatttaaaaaaaaaaaaaaaaaaaaattaaaaatagccgggcatggaggggtcagcccgcagccccagatattcaggagtttgagagcagctttggcaacatagcgggatccctctacaaaaaaatgtcaagaattagccaggcatggtggcctgcacctgtgtagtcacagctactccggagactgaggcaggaggatcgcttgagcccaggaattccaggctgcagtgagctatgatcgcaccactgcactcaagcctgggagacagcaagagaccctgtctccaaaataaaaaaagacaagaggaataaaaggacttcaggaagaggcaaggcagccacagatggggggagttagaggcccctgttccagttgccttccccaggtattaacactgtggatgccgacagtgatggagataatttcaatttgctgagtccctaatatttccagaaaggccactatgctaagtagtttacacgcagcgagttgtattaattctcattgggtggggacctctgttgctcccatttttacatacagagaaactgaggccctaggaggcgaaccccttggcctcaggcacaaggcgagtggatgctggaggtgggattcccagggattgcagggggagggggtgttcccagacctcttcctggcccgcgcggaggggtcgcccctgaatccctgggagcgagacctcacctgtccgtctcccaactcctcatgcccagcctcaccttgcccttaacgtccagaatgaagacagccgaggcggacatggtggcggccgaaggacttaggagtcggggagggagcgccgggaggcgatggcggcgccgcttccttcttcctgcggaagcgcctgcgcccaggtgagagcccaggtgtgtgcgtcttaaaggggaggcggccaggtgagcagcgctgtcggccaacttgaagatggctgcggggccgggagaggtactgcgacttcagatgggtctgctgccccccttcactttccctagccacccaggagtaatgacgggtggagaccccaaaccaatcaaccatccttccatccattcattcatccttcctttcattcatctatccatccattcgtccatccatccattcattcttgcattcattaatccatccacgcatccactcatttagccattcattaatccatcttccatcgattcattgatccatccttccattcgtcatccatttcttcatccatttttgcattcatttatttgttcgtctatccattatccattcatccatccatttattcatccattcattcatcccttcttgcattcattcatttattcatctttccattcatccatccattcatccattctaacattcatcaatttattcatctatccatccatccatccatccgttcatccattcttgcatcattaatttattcatctatccattcatcaatccatccatccatccattcttgcattcattaatttattcatctatccattcatccacccatctatccattcattcatcctctcattgattcatccatccattcaccttctttctcctctgtctcacccacacacgtcagcccccatacagcagggactttgtcttgttcatgtttatgtccctagtgctcagcactgggtgctcaaaatttgcccaattcattcattcactcattcatataataattttcactggtgaattttactgactgaatttgaaatattcattcactcagtaacaggaactgtggatataattccgagcaggacaaatgtacttgcttttattattcttacaaatttactcttattcatttcaaataaaaaatttatttttttttgttttttgaaatggagtctcactctgttgcccatgctggagtgcagtggaatgattttggctcactgcaacctccacctcccaggttcaagcaatcctcctgcctcagcacccctagtagctgggattacaggcaagcgccaccatgcccagctaatttttttttttttttagactccaggctggagtgcagtggcatgatctctactcactacaacctccgcttcccgggttcaagggattctgctgcctcagcctcccaagtagctgggattacaggtatgcgccatcacgcctggctaattttgtatttttaatagagatggggtttcaccatgttggccaggctggtctcgaactcccgacctcaggtgatccacccgcctcagcgtcccaaagggctgagattacaggcgtgagccaccgcacccagccaaaaaactttttttgtagagacagggtctcactctgtaccctagactggactgcagtgatgcaatcatggctcactacagcctcaacttcctgggctcaagccatcctcctgcctcagcctccctagtaactggaactacaggcacaaaccgccacacccagctaattttttttgagacagaattttgctctagtttaccaggctagagtgcagtgatgtgatctcggctcgctgaaacctatgcctcctaggttcaagcaattctcctgcctcagcctcccgagtagctgagattacaggcatgcgccaccatgcccggctactttttttgtatttttagtagagacagggtttctccatgttggtcaggctggtcttgaactcacgacctcaggtgatccacccgccttggcctcccaaattgctaggatgacagatgtgagccactgcgcctggccacaactagctaatttttttttttttttttaatttggagtctcgtcctgttgcccaggctggagtgcaatggcacaatctcggctcactgcaacctctgcctcccaggctcaagcgattctgctgcctcagcctcccaagtaactgggattacaggcgtgcaccaccaagcccagctaattttttgtatctttagtagagatggggtttcaccatgttggccaggctggtctcgaactcctgacctcgtgatccatctgccttggcctcccaaaatgctgggattacaggcgtgagccactgcgcctggcccacacctagctgatttttttttttttttttgagacagagtctggctttgtcgcccaggatggagtgcagtggcgcaatctctgctcactgcaacctctgcctcccagcttcaagcaattctctgcctcagactcccaagtagctgggattacaggcgcctgccaccacgcccggctaattttttttttgtatttttagtagagacgggggtttcaccatcttggccaggctggtcttgaactcctgacctcgtgatccacccgcctcagcctcccaaaatgctgggatgacaggtgtgagccaccgcgccaggccaggcccacctagctaatttttttttttctttgagatggagtctcgctctgttacccaggctggagtgcaatggcgcgatctcaactcactgcaagctccgcctcccaggttcacaccattctcctgcctcagcctcccgagtggctgggactacaggcgcctgccaacacgcctggctaactttttgtacttttagtaaagacagggtttcaccatgttagccaggatggtctggatctcctgacctcgtgatccgcccgcttcggcctcccaaagtgctgggactacaggtgtaagccaccgcacccggcccgacctagctaatttttacattttttgtagagatggtgtatcggtatgttgcccaggctggtctcaaactcctgggctcaagcgatcctccccccttggccctccaaagtactgggattacaggcgtagtctgagccactgtgcctggtttgtgcagattaaatgagttattctgtgcaacgtggtgttggaagggaacttggatgtagctgactgtcaaccatgtcgctgagaaggaggaggatgaagatgatgatctggatgatgatgtagcagttgagagcacagatgctgggtttgatttttgataccaccacacactggctataaggcatgggctggtgaatgcacctgctgtgcctcagtctcctcttatgttaaatgggtataacagccatggtgccctctcctgcagttgcatagccaaatacctggcatggcccctggctccatgcatgtttcgtgcacaccagctgctgcagacccagattccacccctggactttccttttttttttcttttgaaatggagtctcagtctgtcgccaggctggagtgcagtggtgcgatctcagctcactgcaacctctgtctcctgggttcaagcgattctcctgcctcagcctcccaagtagctgggactacaggtgcactccaccatgcccagctaatttttgtatttttattagagatggggtttcaccatgttgaccaggatgctgtcgaactcttgacctcgtgatccgcccacctcagcctcccaaagtgcggtagttttgaggacagggcagaaggaaagggaaagtaaacctcagccttgcttagaaccaccttgcttggctgagggagggagatgtcctgcagggcctgcagggaacaagactcagcctacccagacctcacttgtcctttccccaaaccctgcccagccctttatcagcccctgtaggtggggacttagagaacagcagctatcaggatcatccacttgcctctccacctgaaattaacatcaacattgacagcagcactgcactttaattaaaacattatcatctgggccaggagcaatgtttcatgcctgtatcccagcactttgggaggccaaggtggacagagcacctgaggccaggagtttgagaccagcctggccaacatggcgaaaccctgtctccactaaaaatacaaaaattagccgggcgtggtgacgcatgcctgtaattccagctacttgggaggctgaggcagaagaatcacttgaactggggaggcggaggttatagtgagccgagatggcaccactgcactccagcctgggtgacagagtgagactccgtctcaagaaaataaataaatagaatgaaaaataaaaagttatcatctggcacaagtctccttcgtgccatcttataaaggtagaagcagggacacagagaagtgaaggcacctgcccaagcccacggccccagagccaggaggcagttgacccagaattcgaatctgagtcccgggatttaagaatctggtcccagcctgcttccgcctgctttgctatattgctggatgcaaatattactattagtaacactaactctggcttaaatggtgctcaccataagtgagggtggccctaaatgtcgcccatgcaggaatcctcaagacagccccttgaattacagaagcctattttttttttttatttatttgagacaaggacttgctttgtcgcccaggctgcggtgcagtggtgcaaacacggctcactgcagcctcaaccttctgaactcaagagatcctctcacctaggcctctccagtagctgggactacaggtgagcaacaccactcccagctaatttttaaattttttttttttttttttttgagacagagtcttgctctgtcgcccaggctggagtgcagtggcgcaatctcggctcactgcaacttccgcctcacaggttcacacccttctcctgcctcagcctccggagtagctgggactacaggcatccgccatcaagcccggctaatttttttgtatttttagtagagacggggtttcaccgtgttagccaagatggtctcgatctcctgacctcgtgatccgcacacctcagcctctcaaagtgctgggattacaggcgtgagccaccgtgcctgcccaatttttaaattttttgtagagatggggtctcgctacgttgctcaagctggtcttgagcttctggcctcaagctgtcctcccacctcagccttccaaaacactgagattacagacacgagtcacctcccccaactctattatcttcatttgacagatagggaaactgaggccttgagagagtaagtgatttgtacaatgtcatccagtcagaagaagcagagctgggatttgagctctggaaagcacaaggtttttttgttttgttttgttttttgttttgagacagagtctcgctctgtcgcccaggctggagtggagtggtgtgatcttgactcactgcaacctccgcctcacgggttcgagtgattcttctgtctcagcttcccaagtagctgggaccacaggtttgtgccactatgcctggctaatttttgtatttttagtagagatgggggttcgccattttggccaggacggtctcaaactcctgaccttgtgatccgcccgcattgcacgttggcctcccaaagtgctgggattacaggtttgagccactgcacccggacttttttgttttttgagatggaatttcactcttgttgcccaggctggagggcaatggtgcaaccttggctcaccataccctccgcctcccaggttcaagtgattctcctgcctcagcctcccaagtagctgggattacaggcatgcaccaccatgcctggctaattttgtatttttagtacagacaaggtttctccatgttggtcaggctggtctcaaactcccgacctcaggtgatccacccacctcagcctcccaaagtgctgggattacaggggtgagccatcgcacctggccctgattattattattattattattattatttttgaggcagggtctctgtcacccaggctggagtgcagtggtgtgatctcagctcactgcaacctccacctccccaggttcaagcaatcaagcaattctcccaccccagcctcctgcacagctgggaccacaggtgcgtgaccaccacatccagctaatttttatactttttggtacagacaggtttcacaatgtcgcccaggctggtctccaacttgtggacttaagtggtccacccgcctcggcctcccacagtgctgggattataggcgtgagccatctcgcccagcctaaagcccaagactttatgttgcttctgcccaaaggaggggggtggtccttcatgctcccagcaactgcctgctgagaaggtcacctagggggatgcagtcactgctaggccctcaccccagcctagacattgctgaacctcaaaataactcgtctcctggcagccgggcgtggtggctcacgcctgtaatcctagcacttcgggaggctgaggtgggtggatcacctgaggtcaggagtttgagaccagcctggccaaaatggtgaaaccctgtctggactaaaaatacagaattagccgggggtggtagcacatgcctgtaatcccacctactcaggagactgaggcaggagaatcacttgaaactgggaggcagaggttgcagtgagccaagattgcgccattgcactccagcctggggcaatagagtgagactctgtctcaaaaacaacaacaacaacaaaatgaagaactcatctcctggggccctgagatgttttcaggcagtaagcagaacccgaaagcctgggcccagtgccctggaatctgaaactccaggcttgtttggcatgaaaaattcatgagcccaaaagcttacttggggtcagagaacagagcagctctgtgtgctggctctgcctgccccgcctgccccacctcagtggcggcctcccccatccccctgaggctgtggccttgtcctagttccttctggatgcctggagcctcctccagcctctcccagggaccacgcctctaggccctgtccacaatcccttctccacaccactaaagagatctctctgaaactcacaattattttttgactctcactctcacatcctctatggccccccattgccctccaaccacccccacctggcacagtcagacacctgctgacctctgccacaggacaccacctgaacctgctgtcccagacaccctaactgcccgaatttcagttcctctcctgctgtctcaagccatcctcccacctcagcctcccaagtagctgagactatagacacgtgccaccacagctggccaccttagccattttgaagtgcacagttcggtggcattaagcacattaatggccatgcaaccgtcaccaccatccatctccagaactttctcatcttcccaaaggaaaacttctccctatgaaacactccttctccctctcccaacccctggcacccactcttcttcttcttcttcttctccttttccttctcctcctcctccttcttcttcttcttttcttttttttatttattttgagatggagtctcaccgtcaccgaggcttgagtgcagtggcacaatctcggctcactgcagcctccatctcctaggttcaagcagttctcctgcctcagcctcctgagtagctgggattacaggcgccccccaccacgcccagctaattttatttttttatattttatttattcatttacttttattattttattattatttttttttgagacagagtctcgctctgttgcccaggctggagtgcagtggcacgatctcagctccctgcaagctctgcctcccgggttcatgccattctcctgcctcagcctcccgagtagctgggactacaggtgcctgccaccacacccggctaatttttgtatttttagtagaggcagggtttcgccatattggccaggctggtctcttggccaagctggtctggaactcctgacctggagatgtgcctgcctcagcctcccaaagtgctgggattataggcgtgagccgccgcgcccagcttttttttcttttttttttgagacggattctcactttgtcgcccaggggctggagtgcagtggcgcaatctcagctaattgcaacctcctccttctcctagttcaagtgattctcctgcctcagcctcccaagtagctgggattacaggcatctgccaccacgctgggctaatttttgtatttttggtagagactgggtttcgccatgttgactaggctggtctcaaactcctgacctcaagtgatccacccatctcagcctcccaatgtgctgggattacaagtgtaagccaccatgcccagctactcaggagtctgaggtgggaggatcactggagcccagaagattgaggctgcagtgagctatggttgcaccactgcactccagcctcggtgacaaagcaagaacctatcttaagaaaatactgtgctgagccagttcctgagaaaacaaaatagaaaacaaaactaaagaaaaggcaaaagttcctcccagcagagatgtgagagaaaaagaaaaaaaaagtcccctgtgacacccccataccccaatcttcgtccctctcataaccactggctgattcagatctttttcagctgggttacatgcaggggggtgtgtgtgtgtgtttgtgtgtgtgtgtgtgtgtgtgtgtgtgtgtgcgcgtgttgccctctttctctctctttctcccataccatataagactatacaacttgtggatgggcacagtggctctcacctgtaatcccagaactttgggaggcagaggcgggtggggcacttgaggccaagagttcaagagcagcctgggcaacatggcaaaaaatctgtctctactaaaaatataaaaactggccaggtgtggtggctcacgcctgtaatccctgcactttggaggctaaggcaggtgaatcacctgaggtcaggagtttgagacaagcctggccaacatgataaaatcctgtctctactaaaaatacaaaaaattagccaggtatgctggcggacacctgtaatcccagctactcgggaggctgaggcaggagaattgcttgaacccaggaggcagaggttgcagtgagccgagatcatgccactgcactcgagcctgggtgacagaacaagaatctgtctcaaaaacaaaacaaaacaaaacaaacaagcaacaacaactatatatatatatatatatatgtatatagactaagctgggcatggtggtgcgtacctgaaatcccagctactccagaggctgaggcacacaaatcacttgaacccaagagaaggaggtttcagtgagctgagctcgcaccactgcactccagcctgggcgacagagagagactctgtcttaaataaaaaaaaaaaaatacaacttgctattatcactcaacaatatgacctggacgctactccggaaagcatgtggttgaaggggaaggaagtgtgtcttgggtgtaaagtcggactccctgggttcagatccttgcagagccacgggctcattatgttactgtgggtaaattacttcacctctctgggtcactttccccaattggaaaatgattataatgatttaatacagagtgcttgggccagacgcggtgtctcacgcctgtaatcccagcactttgggaggccgaggcggtggatcatgaggtcaggagattgacaccatcatggctaagacagtgaaacccgttcttcactaaaaatacaaaaaactagctgagcgtggtggtgggtgctgtaatcccagctactcagaaggctgaggcaggagaattgcttgaacccgggaggcagatggtgcagtgagctgagatcacgccactgcactccagcttggcgacagagtgagactccatctcaaaaactaaaacaaacaacaacaactatatacacacacacacacacacatacacacacagagagcactttactgggtgagccaagatcgcgccactgccctccagcagccttggttcaaaaaaaaaaggtgcttggccagcatggtggctcatgcttgtaatcccagcacttcaagaggccaagatgggcagatcgattgaggctaatgagacctggtctctatttcaaaaaaaagaaaaagagttaaaaaaatatataaagcatttaataccttgtctgacactgactaagctttctataaacattcactctttctttccttttttttttttttgagaccgagtctcgttctgtcacccaggctggtgtgcaatggtgcactcttggatcactgcaacctctgactcccaggttcaagtgattctcctgcttcagcctcccaagtagctgggattacatgcatgtgccaccacactcggctaattttgtatttttagtaaagacgggatttctccatgttggtcgggctggtctcgaactcccgacctcaggtgatccgcccgcctcggcctcccaaagtgctgggattacaggtgagagccactgcgtctggccttagagacagattttcatcgtgttgtccaggctaatcttgaactcctgtcctcaagtgaccctcctgcctcccagagtgctgggatcacagatgtgagccaccactcctggctgtaaacagtcactcttattataatctgcaggaccaccaccttttttcttaaactattttaaaaattctcattttgaaatgtaacttttttatttattatgtatacaaacacacatatatatttgcatcataaatgttattcccaatatgggacagattcctttcaacccccaggtgaatcacatggtaccctggaaagacctaggaagccctccctcccaccatctccagggaggtagtgagaacggcaggtgctggggactgggaaggctttggagtttcccagcctacctcttctccctttctcaacaaaggatacctgttccctattattccccttatccactcttcccttttttaaaaaaaacccacaaaaccatcattagtaaaaaaacaaacaaaaccccttcaagtattgggagttaggggtcctgggctgggacttggagttacaggtcaccaaggaagagggaagggaagagaaggaggggctgtcacttactactgctggctttcttccttgctgcatgctatggcaactgtgtgtcgacctcctttgctggcaactgcacgtatgggaccactgagcccggaatgaaacagtcctttttaaaaaactttttttgagacagagtctcgctctgtcacccaggctggagtgcagtggcatgatttcagctcactgcagcctccacctcccgggttccagcaactctcctgcctcagcttcccgagtagctgtgaatacaggcgcccgccaccacatccggctaagttttgtattttagtagagatggggttttgccatgttggccaggctggtctcaaactcctgacctcaggtgatccacctgccttggcctcccaaagtgctggggttacaggtgtgagccactgcacccagcctagaagttcttcactgataaaatgtgaggatatttctcaaggtgtgtgatactgatgtcagctcatttgatgttgagatactgatccaccgaatggagggtgccacagatgttcaggtctttcttgagttccatgaccacattcatgcccacaagggacttgaaaaaaggaatagaagagcatgatgctggcgacctgaccaggaagagcaacacatattttattttatttatttatttatttgagatgctgtctcactctttcacccaggccggagtgcagtggtgcaatcttggctcactgcgacctctgcctcccggggtcaagcaattctctgcctcagcctcctgaggagctgggattacaggcgcccgccgccacgcccgtctaatttttttttttttttgtatttttagtagggaccaggtttcaccaagttagtcaagctggtcttgaactcctgaccttgtgatccactcaactcagcttcccaaagtgctgggattacaggcgtgagccaccgtgccgggccagcaacacatattttaaaagggcagaagtcggttgggcacagcggcttacacctgtaatccctgcactttgggaggctgaggttggtggatcacctgagatcaggagttcgagaccagcctgggcaacatggcgaaaccccgtctctactaaaatacaaaaattgccactgtactccagcttgggcaacagagcaagattctgtctcagaaaaaaaaggcaggcagagtacgggggagaaggtcaagtattcacaaactaaactaagctatgtaactacaattctgtttccagtgcccagaagctgctcctatcatcccagtagttattactaccccaaaagtcaaccactgatatatgttctgttactataggttgattagctatgcctgttcttgaacttcagaaaaaagtgtgtggtttctttcacacaacattatgctttttggggagagattcatccatatttttgcctgtatcaatagtttattcctggaccaggcgctgtggctcacacctgtaatctcagcactctaggaggctgaggcagaaggatcacttgagaccagcctgggcacccatagggagaccctcatctccacaaaaatttaaaaaattagccgagtatgtccaggtgcggtggctcatgcctataatcccagcacttttggaggctgaggggggcggatcacctgaggtcgggagttccagaccagcccgaccaacatagagaaaccccgtctctactaaaaatacaaaattagccaggcgtggtggtgcatgcctgtaatcccggctactcagagactaaggcaggagaatcacttgaacttgggagacggaggttgcggtgagctgagatcacaccattgcaccattgcactccagcctgagcaacaagagtgaaactttgtcaaaaaaagaaagaaagaaagaaattagccaggcatgatagtgtgtgcctgtagtcccagcaacgggaggctgaggcaggaggatcacttgagctgaggaggtcagggcttcagtcagctatgactgcaccatcgcaatccagcctgggcaatacagcaagatcctgtccctaaaaaaagaaagaagaaaacattcattcctcatcactaaggagaatcccatggtatgggtgaaacccaccatggtttgcttcaccaatgatctgttaatgggcatttgggctgctcctagtttttttgcccactacgaataaggatactataaggctatcatgaacatttatatgaatgtgtctgtgggtttttcttttcttcacttatactttttcttgggtatatacctagaagtgcaatttctagggtattaactttgcaagaaactgccagatcgttttccaactggttgtggcattttacattctcaccaacagtgtaggagagcccccatatgcttcccatcttcctcaacacttggttcgaccagtctttttaattttagctattcaggtgggtgtgcaatgatatctcatcgaggttttgatttacatttccctgatgacttcgtgctttattcttttttctttctttctttctttttttttttttttttgagacagggtctcactctgtcacccaggctggagtgcagtgatgttttcacccatttttctttctttttttttttctttttgagacagagtttcgctttttgcccagttctgttgcccagtttggagtgcaatagcgtcatctcagctcaccgcaacctccacctcctgggttcaagcgattctcctcctcagcctccagagtagctgggattacaggcatgtgccaccacaccaggctaattttttgtatttttagtaaagacagggattctccatgttggtcaggctggtctcgaactcccgacttcaagtgatccgcccgcctcggcctcccaaagtgctgggattacaggcgtgagcctccgcacccggcctgttttcacccattttttccacaataactgtcaaggctgcagggaacaccccttggttactacatcccatgcacacacacctgcagtggtttgtccagggtcagtgccagacaggaatcgcaccaggtgaacatgacttggatatactctttctgccaggaaacattctgcttcaaagtattcactcacctgattttatgttattaaactctaaaattcttaccaatctgatgaatgaaaatggcatcttttggtatgttcagtggtacacggtgatcaatatttacctatcaattatttatctatccatcttctattattatttttattttattttattttattttattttttgagacggagacggagtgtcgctctgtcgcccaggctggagtgcagtgacacggtctcggctcactgcaagctccgcctcccgggttcacgccattctcctgcctcagcctcccgagtagctgagattacaggtgcccgccaccactcccggctaatgttttgtatttttagtagagacggggtttcaccgtgttagccaggatggtctcgatctcctgaccatcttcccgcctcggcctcccaaagtgctgggattacaggcgtgagccactgcgcccggcctattattattattaattcttattattattttgagacagggttgcccaggcagtggcacaatcatagctcactgcagcctcaaactcttggactcaagtgatcctcctacctcaggctcccgagtagctgaattacaagtgtgcctcaccaagcccagctaattttttaaattttttgtacagatgagggtcttcctatgttgcccaggctggtctggaactatttggcccaagctatcctcccgcctcagcctccggagtggctgggattacaggcccgcgccaccacgcccagcctcaatatctccttgacgatgaaatgcatagatgaatgaatgaatgaatgacctctgtttgctcaccatgcacaccctcaagagggttacttgagagctaagactggaaacaaaggttggggccccacccctcccgggccaggccccgcccccggtccccgccctcgccctctcgaggctcccattggaggaggcgcgcgggggctggcccggcgggaggggcggggccggggcccggggcggggcgctgcagcccgcggagcctcccgcccgcccgggctggggtcgcgctggctcggactccgctccccgccccgccgcggccatggaggacgagcggaaaaacggagcctacggtaggagccgcctccggtcaggggccgcctctgctgacctgcgggtgggaggaccttgagccagggggacatctgagaccctaggcaccggcgctgcggctggatggccctccgcgctcgggcccccgcatccgacactgcgcggatcccacgccccctgctctaaccgggtcgccccgcgtcccctccccgggagccccagctccccctccggctgatgggccggggctcacggcgcatgctccgcccggggaggtcccgttatctgggcggctcggatggcgggcgggggaggggaggcgcggcgatctgggctcggaaaagagacagggccctgacctcctcaaatccccctcctcttccaatcccctttgtccatttcttcctccttcccttttccgccagaagtagccgtccggggcttttggccagatggggaaactgaggcaagactgggcagaccgaatacccagctgagagcccaccgagtctggccagccgcctggaaacggcggaaagaagggcgcctttggtgagggggcaggaaggaagcaggaaaaaattgagaaactttcccctccctgtgcaaggggctggcggctcccacctcccatttcgagaggtgctggcgactggaacttcctccggcgaacctcttggggcgacctcaggcatttggccccggggatgggcccaggatgtgggcttctccatcaccagcgccctgtggtgccgccctcccctgaattcccacggtgggaggagttgccatcctcagtttctcctttctcttctccattttgggtccccaagacccaacggagccccagccccacgtgatactaccctgggggcaaagaagcactgtcgcgcccctctttgtgtgacaagaacttcctggaaactgtgacactgaagggccctggggagggggccggaaacggctcgaaaatattcaagaaaaacaagttgggtagagctgtgcctccctgcccccagggactgtatggcctcaggaggctgccaggagagacagatcagggaggctgggaccttccctgcagagcccagccaaggggaggcagcaggacctggccacctcccagcaccccctccccaattgaagcttccagcccagtcccctggagggacccccttggtcttcatttgggctcaaattccagccccagtggctgtgggtgctgtgtgtcccttgggtgtggcaggctgtctctgacctgagagtctcagcctgaggttctagccaggtcttgcccgcttgtgggcagcatctgagggggtcttgggtctctatgaagtttggctgggacagggacgaggggcagaatggacaatgatatgattcacccagccttgaatttggccaaaggatggaattgagctgtggtcggagctaggcagacctcccaggcccacacatgagacaggggaccctgccagacagagcctttgctgggcttaagggagtaccttcaatcaacaaatatttattgagcacgatttaggcaggggtctagacactggaaacccagcagtgaatagaccagtgaaatccttgaccgcagggagtagtcaagggaaggaatgtgtaattttaggttgttgtaagttgtgaagcaaagaacaagacgtcgtgtgatcttgtgtggcagaaacagcagcgattattttaggttactaagggctggaggttgagccagccgtgggaagatttaggggaagtgtgtttcacacagaaagaacagcaaacaaaccacgtagttacttaattacattttgccttggggccaaagggggcatctggtttgattgcttgaagtaggggttttgcttagcttggaagtagttccttcacatcagaaccaaaaacctgggggccttggactggcccatgacgtccctgatagatgaagggagctttcccctggggatggtgtggaagaggggctcacttatcctaccctcctgccccagtggcttcccatccgtcatgagtttaggggctgacatcagacaaacctaggctcaaatcctggctctgacacttaggagccgtgtggccctgggtgagtccgtgacctctctgaagctctgtgtctttgtctataggactcggtggaccacactcactggtgggggaagaattttgcataggctgtcaagctcgatgtgctcaggaggcctctggggctggtagtactggggacatggctttcccgtgagctgatagagaagcaacccaaggcattgacttgggtgagaccaggttgggcaggaagtgcattcctcagcagagatcatatctaaaggaaggcagcagttccaagggaaatggggaaatggctctgggccccggcggatgtcagcaatgggcattgccatccttcccagccagcccacccttggcaagagcagtgcagaaaaagattctgcaatccaaaacaataaactctgaccatggagaaataaaactggggtcggggggacagtagtgatgcttatttaaaaaacggactcttgccaggtattgtggctgacacctgtaatcccagcactttaggaggccaaggctgggggatcacgaggtcaggagatcgagacaatcctggctaccacagtgaaaccccatctctacaaaaaataacaaaaaatgccagccacagtggttcatgcctgtaatcccagcactttgggagccaaggcaggtggatcacctgaggtcgggagttcgagaccagcctgaccaacatggtgaattcccatctctattaaaaatacaaaattagccaggcatggtggtgcatgcctgtaatcccagctactccagaggctgaggcaggagaatcgcttgaacttgggaggcagaggttgcggtgagccgagtttgtgccactgcactccagcctgggcaaaaagagtgaaattcagtctcgaaataaataaataaataaataataaaaatacaaaaaattagtgtacctatagtcccagctactcgggaggctgaggccggagaatcgcttcaacctgggaggcagaggttacagtgagccaaggtggcgccactgcactccagcttaggtgacagagtgagactccgtctcaaaaaaaaaaaaggactcttggccaggcaaggattacaggttcacacctgtaatcccagcactttgagaggctgaggtgggtgggtcacttgaggtcaggagatcgaggccagcctggccaacatggtgaaaccccgtctctattaaaaatataaaaattagccaagcatggtggtgcacatctgtaatcccagctacttgggaggctgagacaggagaactgattgaacctgggaggcagaggttgcagtgagctgagatggtgccactgcactccaacctgggctatggagcgagactccatctcaaaaaacaacaaaaaccagactctggctgggcagtcgctgatgcctataattccagcactttgggagtcccaggtgggaggatcgcttgagcccatgagtttgagaccagcctgggcaatatagtgagaccctgtctctacaaaaaaatttaaaaattaactgagcatggtggtgctcaactgtattccagctacttgggaggctgaggtgggaggattgcttgagcccaggaggcagaggttgcagtgagcaaagatagcgccactgcactccagcctggatgacagaggaagaccctgtctcaaaataaaaagcagattccctggtcccatttgctagaatacaattcagcctgcagtgaggccctggcacctgatttaaatatatatatatacatgtggccgggtgtggtggctcacgcctgtaatcccagcactttgggaggccgaggcaggtggatcacctgaagtcaggagttcgagaccagcctgaccaacatggcgaaaccctgtctctactaaaaatacaaaaattggctgggcacagtggctcacgcctctaatatcagcactttgggaggccgaggcaagtggatcacctggggtctggagtttgagaccaaccttaccaatatcgtgaaaccctgtctctactaaaaatacaaaaatgttcttggaatagtgacgtgcacctgtagtcccagctatgtgggaggctgagacaggagaattgcttgaacccaggaggcagaggttgcagtgagctgagatcgtgccatttctctccagcctgggtaacaagggcaaaactccatctcaaaaaataattatatacatatatattaaaatatatatatacacatacacatatatatgtatgtatgtatgtatgtatgaaaaggtagttacttacggctattttttttttttttttttgagacggagtctcgctctgtcgcccaggctggagtgcagtgacacggtctcggctcactgcaagctccgcctcccgggttcacgccattctcctgcctcagcctcccgagtagctgggactacaggcgcccgccaccacgcctggctaatttttttgtattttttagtagagaccgggtttcgccatgttagccaggatggtctcgatctcctgaccttgtgatcagcctgccttggcctcccaaagtgctgagattacaggcgtgagccacctcgcccggcctcttggggctattttctttgaaagggataatacattcacatgctttaaatacaaaagatacaaaagatgttacggctttgagatgaaagtttccctcttgctctcccaccccggaccatactttattctttgttgttgttgttgttgtttatacacagggtctcactctgtcacccaggctgggctagagtgcagtggtgcgatcatagctcaccgcagcctcaaattcctgggctcaagtgatcctcctgcttctgcctcctgtgtagttgagactacgggtgtgtgccgtgatactcaactaatttttttttttttttttttttagaggcagggtctcaccatgttgcccaggctggtcatgaagtcctgggctaaagcaatcctcctgtactggcctcccaaagtgctaggattataggcgtgggccaccacacccagcttttttttgtttatttgttttgcctaatatacattggagaggatctcttgtcaacacctccaaagcttcctcaatcatttattattattattattatttttttttttttgagacggagtctcactctgtcgctcaggctggagtgcagtggcgtgatctcggctcactgcaagcaccgcctcccgggttcatgccattctcctgcctcagcctcccgagtagctgggactacaggcgcccgccactgtgcctgccactgcccccggctaattttttgtatttttagtagagacgggatttcaccgtggtctcgatctcctgacctcgtgatccgcccccgcctcggcctcccaaagtgctgggattacaggtgtgagccactgcgcccagccaccccgtttctactaaaaataaaaaaattagctgggcatggtggcatgcacctgtagtctcagatacttgggaggctgaggcaggagaatcgcttgaacccaggaggtggaggttgtagtgagccgagatcgcgccactgcactccagcctgggcaacagagcgagactccgtctcaaagaaaaaaaaaaaaaaaggagagacagggtcttgctatgttgccttggctagcctagaactcctgagttgaagggatcctcccgcctcagcctcccgagtagctgggactgatcacaggtgtgtgccatggcgcccagcacaatcttttttcacggtagcatagaatagtacatttgtggatgggctgtcttttatttagccaatcaaagggaatatttattttaaactttttttcgaagttggaaatacatacataaaagggcatagatcctaaatatatgaggctgaaggagctttcacaaggtgaacaccttatctggccagcaaccagatgaggaaaaaagaacatttccagggccctgtcatgtgcaaggagggcctatttgtattattattttattagtatatatatattttatttatttatttatttttttaatttgagacagggtctcactctgtcacccagggttaagtgcagtggtacaatctcggctcactgcaacctctgcctcctgggtttaagcaattctcctgcctcagcctcccaaggacctgggactacaagattcgagttaccgtgcccgattaatttttgtattttttgtagagattgggttttgtcatgttgcccaggctggtctggaactcctgggctcaagctatccacgtgcttcagcctgccagagtgctggggctagagtcgtgagccactgcacccagcctacctttttttttttttttttttttgagatggagtcttgctctgttgcccaggctggagagcagtggcgccatctcagctcactgcaaactccacctcctgggttcaagcgattcttctgcctcagcctccccagtagctgggattacaggcatgtgccaccacgcccagctaatttttgtatttttggtagagacggggtttcaccatattggccaggctggtcttgaactcctgaccttgtgatctgcccaccttggcctcccaaagtgctgagattacaagcgtgagcaaccatgcccggcccagcctacattttaaattgaagtataatttggtttgtttttgttgcttttttcttttttttcaagacagaatcttgctctgtcgcccaggctggagtgtagtggcatgatctcagctcactgcaacctccgcctcctgggttcaagtgattctcctgcctcaggctcctgagtagctgggattacaggtgcacctcaccacgtccagctactttttgtatttttagtagagactgggttttgccatgtttgtcaggctggtctcaaactcctgacctcaagtgatccacccgcctcagtctcccaaaatactgggattaaaggcaagagccactgtgcctggcgaagtataatttacatactaaaaaaaccacacattattagtttttttgtagagatagagtcttgctatgttgtccaggctggtcttgaactcctgggctcaagtgatcctcccacctcagcctctcaaggtactgagattacaggtgtaagccaccatgcccagcccataactctttttaaatgtacagatctatgatgttactcttatttatttatttattttttgagacagaatctgtctctgttgcccaggctgaagggcagggcacaatctcggctgactgcagcctctgcctcctgggttcaagttattctcctgcctcagcctcccgaatagctgggattataggcatgcacaaccatgcccggctaatttttgtatttttagtagagacagggtttcactatgttgaccaggctggtctcaaactcgtgacctcaaatgattctcccactttggcctcccaaagtgctgggattacaggcgtgagccaccgagcctggctaatgttacttatatttagattgttgggtggtggcctgtttttgtaaggctagtgggctaagaatggctcttatatttttaaatggttgtgaaaaaagaaaaaaaaatatatatatatgacagatgatatgtgaaccacaaagcttaaaatctttaatatcttgtccttaacagaaaacatttgcagagccctggtagagaattctccctagagacttttcttttccttttttttttttttttttgagactgagtctcactcagtcacccaggctggagtgcagtgacgtgatctcggctcactgcaagctccgcctcccgggttcacgccattctcctgcctcagcctcccgagtagctgggattacaggcgcccgccaccatgcccggctgatttttttgtatttttttagtagaaacggggtttcactgtgttagccagatggtcttgatctcctgacctcgtgatctgcccgcctcggcctcccaaagtgctgggattacagtcgtgagccaccgcgcctggctttttttttttttttttttttttttgagatggagtttcactcttgttgcccaggctggagtgcaatggcgtgatcttggctcactgcaacctttgcctcccgggttcaagtgattctctggcctcagcctcccgagtagctgggattacaggcatgtgccaccatgcctggctcatttttgtatttttagtagagacggggtttcaccatgttggccaggctggtctggaactcctgacctcaagtgatccgctcgcctcggcctcccaaagtgctgggattacagttgtgagccaccgcgccccgccaagacttttcttttgccatttcccaatcgatccccaaggtgaacatgatatttatttatttatttttaatttaaaaaaaaattttttttgagagggagtcttatgatgttccccaggctggttgaattccccggctgaagcgatccttccccttcaacctcctaagtaggggactataggcatgtgcctctgtgccgggctagagagcattattttaaaatattattttaggctgcgtgcagtgcctcacgcctgtaatcccagcactttgtgaggcccaggcgggtaggtcacttgaggtcaggagttcgagaccagcctgaccaagatggtgaaaccccatctctgctaacactacaaaatttagccaggcgtggtggcaggtacctgtaatctcagctactcagggggctgaggcaggagaattgcttgaacctgggcagcagaggttgcagttagccaagattgcgccactgcactccagcctgggcaagagagtgagacactatttcaaaaaataataaataaataaataaacaaacaagagacccggtgcagtggttcactcctgtaatcccagctgtttgtgaggccaaggtgggtggatcgtggttcactcctataatcccagctgtttgtgaggccaaggtgggtggatcgcttgagtccaggagtttgagactagcctgggcaacattgcaaaaccccttcttcccaaaaatatgcaaaaaaattagctggtcatggtggcttatgcctgtggtccgagccactctggagggtgaggtgggaggattgcttgagcctaggaggcagaggttgcagtgagccgacattgtgccactgcactccaacctaggtaacagaatgagaccccatctcaaatatacaagtaaacaaataaactcttacataataaaattaataaattccctctgttctggcagggggactaaaagctaattataagtaagtcctcaagtccatggaagattttagctttccatgtgaaagaatcttctacaaatctttggctagctgttttcacctcagaggtagctcagccaagaagtctccttccagattgtgacctattaatttctgtgtgtgtgtggcatctggatctttttaaagcttcttaggctgagccgggtgtggtggctcactcctataatcccagcactttgggatgccagggcggaaggatcacttgagcccaggaattttataccagcctgggcaacatagtgagaccctgtttctgcaaaacaaaaaattaaaaattagcggggcgtggtggtgcatgcctgtggtcccatccactagggagtctgaggcgggaggatcacttgagcccaggaggtcaaggctgcagtgagctatgattgcgcccctgcacttcatcctgggcaaaaaaggagaccctgtctcaaaaaataaaaaataaaaaaaggttaaatgtttctagaagcaaatctctggtttggtgcctaacatagtccagcatacagtaggcgctctatcttttgcccttaacccttctgagcctccccacccagatgctgtcctcaaaccctttgtcaaaagaggtgtctgggcagctggcgatgctcattccccaggcacagacttctgggaaggcagaggccagtggctggctgtacgggtgaggccttgggccgctgcagcccttggggacttggccagtgtccggaagctgtgggggctgggtggcatttgatgtcctggcaccagcactgtgactgggcaggctgtggcagttctcttatcgcccacgcccactgcacttgggtgggtcagccgtcacagccagcaaggctggcacccgaaggctgcctctcccaatcctggccttgtccaacagctcaattttcccaatttttcttccacaccattgccgcaacgttatctctgcttctcccagtacctgccaaggaaaaggcctgggttggctccagcagggcgttggtttgactcctggctgtgctcctcaccagctgtgtggcccgagcaagcaacctcagtgtgcccgtcgtgaaatgggatcacactaatggttagtggggattggagaagtttttgttttgttatttttatttgtttggttttggttttttagagacagtgttttctgtcatccaggctggagtgcagtggcgtgatcacagctcactgcagcctctgcctcccgggctcaagcgattctcccacctcagcctcctgagtagctgggaccacaggcatgcaccaccacacccagataatatagttattttttactttttattttctttcttttttttttttgagatggagtcttgctctgtcacccaggctagagtgcagtggcgcaatcttggcttgccacaacctctgcctcctgggttcaagtgattctcctgcctcagcctcccgagtagctgggactacaggcgcccaccactatgcccggctaattttttgtatttttagtagacatggggtttcaccacgttggacaggctggtctcaaactcctgacctcaagtaatctgcctgccttgacttcccaaagtgctgggattacaggtgtaagccactgcgcctggccaagttgaagactttggctgggtgtagtggctcatgcctgtagttcaagcactttgggaggctaaggcaggaggactgcttgaacccaggactttgagaccagcctgggcaacatagtgagaccccgtctctttaagaaaaatggaagagggtggtagcagagtcagaggaggacatggaacgacggaagcgaggtgggtttgatgtgattgctgtctttaaaaatggaagaagtggccaggagccaaggaatgtgggcggcctctagaaggtgaaacagacaaggaaacagattttcccctaaaatctccgaaagaaacagccctgcctacacatcgattgtagcccagtgagatgcattttgtgcttctgtcctcctgagctgtgagataataaatttgtggtttttatttattattattattattatttttgagacgagttttgctcttgttgcccaggctggagtgcagtgatgcgatcttggctcactgcaacctctgcttcctggtttcaagcaattctactgcctcagcctcctgagtagctggaattacaggtgcacaccaccacgcccagctaattttttgtatttttagtagagatggggtttcaccacgttggccacgctggtctgaagctcctgacctcaggtgatccacctgcctcggcctcccaaagtgcagggattacaggcatgagccaccgcacccgtccataaatttgtgtttttttaagccaccaaggcattggtgtcttgttacagcaacgaaaggaaataatgcatttgaccctcaaaccacatgggtgtgaggggcaccaaccccctgtgaaattagaaatctgtgtatgccttaagtttttgtagagacagggttgtgatctgttgatcaggctggtctccaactcctggcctcaagagatcctcccacctcagcctcccaaaatgctgggattgcaggcatgagtcaccatgcccggcctgcatataactgcatataagtcccccaaaacttaattagtgatagcctactgttgactcttagccttacggacaacatatcaacatacacatattgtgtctctgtattatatatatcgtattcttacaataaagtaagctgaagaaaagaaaatgtggctgggcgcggtggctcacgccgataatcccagcactttgggaggctgaggcgggcggatcacccgaggtcaggagtttgagaccaacctggccaacatggtgaaaccacgtctctattaaaaatacaaaaattagccggacatggtggtgcgtgcctgtaatcccaggtacttgggaggctgaggcaggagaatctcttgaacccgggaggtagaggtcacagtgagccaagattgcgccactgcactccagcctgggtgacagaatgagactccgtctcaaaaaaaaaaaaaaaaaagaagaagaaaagaaaagaaaatgttattaagttggtgcaaaagtaattgcgttttttttttttgccattccttttaagggaaaaaatattaaaatgtaaggaaaagaaaatacatttattatttattaagtggaagtggatcatcaaaaaggttttcagaggctgggcgtggtggctcacacctgtaatcatagcactttgggaggccaaggcaggtggatcatttgaggtcaggacttcaagacaagcctggccaacatggtgaaaatcctgtctctaccaaaaataaaaaaaaaaattaggggccaggtgcagtggctcatgcctgtaatcccagcactttgggaggccaaggtgggaggatcacttgaggtcaggagtttgagaccagcctggccaacatggtgaaaccccatttctactaaaaatacaaaaattagccaggcatggtggctcacacctgaagtccccgctactcgggaggctgaggcacaagagtcgcttaaacccgggaggcggaagttgccgtgagccgagatcacaccagtgcgctccagcctgggcaacagagggagactccgtctcaaaaaaaaaaaaaatggtcttcacattgagtgagctgaggaggaagaggaagaggaaggggaggggttggtcttgctgtctcaggggtaacagaggcagaagaaaaattgtgtttaaggggaaccatgaagctcaaacctgtgttgttggaaggttaactgtccaaacattgacttgggagctggacagcttgggtctgctgattgaaatctttcacaccatgggcaccttctttctctctaggcctcagttgatctgtctgtcaaatggggataatgataggaggtgctgtaaagatgaaatgaggcgggctggacatggtggctcacacctgtgatcccagcactttgggcggccaaagcgggattgcctgagccaaggatttagagaccagcctgggcaacatagcgaaaccctgtctctaccaaaaatacaaaaattagccgggcatggtgacatgtgccagctgaggtggaagatcacttgagccctggaggtcgtggctgcagtgagccaagatggtgccactgctttccagcctgggtgacagtgagaccctgtctccaaagaaaaaaaaaaaaaaggatgaaatgaggtgaaccatgtaacattttattattatgtttatttatttattgaaacagagtgaaactgtgttcaatatacacagtgagaaagacagggtctcattctgtttcccaggctggagtgcagtggggcaatctgagccctctgcaacctccgtctcccccggctcaaagattctctcacctcaggctcgcaagtagctgggactacaaaggcatgtcaccacgcccagttaatttttgtttttttgttttgttttgttttgttgtttttttagagacgaggtcttgcctgttgcttagtctgctcttgatctcctggactcaagtgatccacccaccttggcctcccaaagtgctaggattacaggattgagccaccatgtcctgtctctattttcacttttatttttagagaccgggacctggcatagtggctcacgcctgtaatcccagcactttcggaggctgaggtgggcggatcacctgaggtcaggagttcaagaccagcctggccaatatggtgaaaccctgtctctactaaaaatacaaaaactagctgggcatggtggtgggcgcctgtctcaaaaaaaaaaaatagagactgggtcttgctctgttgccaaggctgtagtacaatggtgctatcacagctcactgccgcctgtaactcctgggctccagtcatcctcccacctcagtctccctggtagctgggactacaggcacggaccaccacgcccagcttgttcttcttatcttttattttttatttttttgagatggagtcttgctctgtcgcccaggctggagtgcagtggcgcgatctcggctcactgcaagctccgcctcccgggttcatgccattctcctggctcagcctccttagtagctgagactacaggctctcgccaccacgcccggctaatttttgtatttttagtagagacggggtttcatcgtgttagccaggatggtcttgatctcctgacctcgtgatccgcccgcctggggctcccaaagtgctaggattacaggcatgagcaaccacgcccagcccttgttcttcttcttatcttgcagcattgttgcaaagatatagcgagttcccatcctgcggggtttagattaggctctcagggcagaaaccattagtatttgctgttcccctcccttcgtccccacccagctaaggttaataagagctaatggaacccatcacaagatattaccaatgttccctctttacagagagcccacaaagccaggccttgagccaagtgtatgccaggcacctctctctgcattttcagctccatctcacagaggagtaactcaagttcacacagctaggcatgtcccagctttaccattcatggcaccaaaccctcaggctccccaatcttttcctgagacagctgagactccctcatgtgttccctccccggtgcggccctgtcatgctcctgctcaaacaccctccatggctcccacgtactcatcaaacctagactgggaacggaccgctcaagtgactagcaaagcccttcccttttctgagcctcggttctctctcctataaaatgggttgatgaaatggcctccagtatggtggagaggatctgaaaggtagtgagttcgctttgctcaccactggctgtctctatgcagccgctcaccctctgccattctagctgacaccagaaacttccggtactcccttgtctctctgccttctggctttaccggtcttactgcctatctgatggtagaagtattctcttatgctttcccttcatacttgtaatagttttgagttttctgtgtttgcgtgattaatccatgtggaattttttttcttttagacagtttcactcttctcatccaggctggaagtgcagtggcgtgatctcggctcactgcaacctccgcctcccgggttcatgccattctcctgcctcaaactcccgagtagctgggactacaggcgcctgccaccatgcctggctaatttttttttttttttttttttgagacggagtctcgctctgttgcccaggctggagtgcagtgtcgtagtctcggtttacttcaagctccacctcccgggttcacgccattcttctgcctcagcctcccgagtagctgggactacagacacatgctgccacacccggctacttttttgtatttttagtagagatggggtttcaccatgttagccaggatggtctcgatctcctgaccttgtgatctccccgccttcgcctcccaaaagtgctgggtttacaggtgtaagccactgcgcccggcctttttttttttttttttttttttgagacggagtcgtgctctgttgcccaggctggagtgcagtggcgccatctcggctcactgcaagctccgcctccctggttcacgccattctcctgcctcagcctcccgagtagctgagactacaggtgtctgccaccacgcccggctaattttttgtatttttagtagagacggggtttcaccgtgttagccagaatggtctcgatctcctgacctcgtgttccggccatgctcgcctaatttttttgtgtattttagtagaggcagggtttcgccgtgttgcccaggctggtctcaaactcctgagctcaggcaatccgcctgcttcagcctcccaaagtgctaggattacaggcatgagccaccatgcctggccttttcttcctaatatacattcagggctactgaataaagaatttatcctttccctgtaaattctacatgtatcatgtatacaattctttttttttttttttttttttttggatacagggtcacactatgtcacccaggctgtagggcagtggcgcaatcacagctccctgaaacctgaacctgaacctcctgggctgacgtgatcctcccaccctaggcttccccagtagctgggactacaggcacatcatgcccggctagtttttaaaaattttggccgggcacagtggctcacatctgtaatcccagcactttgagaagccgaggcaggtgcgtcgctggaactcaagagttcgagaccagctgggcaacatggcaaagcccagtccctacaaaaaaatataaaaaattagccgggcgtggtgttgtgtgtctgtagtctcagccacttgggaggctgagggagatgggcttgagctcagggggtagaggttgcagtgagccgagatcatgacactgtactccagcctgggcaatacagccagaccatgtttcagaaaaaaaaaaaaaaagtgttttttttttttttaagcctcagagcctactttggctcaggaggctgctcgatttgcaatacaaaaaagaaaaaatatttttgtagagacgaggtctcaatatattgcccaggctagtgttgaactcctggagtcaagcaattctcttgccaaatgttgggattacaggcgtcagccactacgcctggcctgagattcatttaagtataaaattagcaaatctccgccggacgcagtggctcacacctgtaatcccagcacttccagaggccgaggcaggcggattgcctgagctcaggagttcgcgactagcctgggcaacacagtgaaacccccatctctactaaaatacaaaaaattagccaggcgtggtggcgtgcacctgtagtcccagctacttgggaggctgaggcaggagaatcgcttgaacctgggaggctgaggttgcagtgagccaagatcatgccactgcactccagcctgggtgacagagcgagactccgtctcaaaaaaaatctgcaaatctccaacctgggcaacatggtgaaatcctgtctctacaaaaaaaaatccaaaaataattagctgggtgcaatggtgtgtgggtagtcccagctactcgagaggctgaggtgggaggatcactcgagcccagcaggtggaggttgcagtgagccaagattgtttcaccacactccagactgggcaacagagtgaggctttgtctcaaaaacaaaaacaaaaaaaaaattactgggcgctgtggctcatgcctgtaatcccagcaccttgggaggctgaggtgggcggatcgcctgaggtcagcagttcgagaccagcctagcaaacatagtgaaaccccatctctactgaaaatacaaaaattagcctggcatagtggtgtgcgcctgtaattccagttacccgggggtgctgaggcagaagaatcacttgaacctggatgttgcagtgagccaagatcgggcaacagagcaagactccatctccaaaaaacaaacaaacaaacaaaaaacgcaaattaatttttaaaatatgtacccttagaaaattctaagctcgtttttattttcagtgttcactctacatacatgtattatatattgtggctattcattcaacaaatacttattaaatgtttgttttatgccaggggctatgctgtatactggggacgcagccggaatgaaagacacacaaatccctgtccttatgcaggcaataggcaagagggcagataattaacaaccaataagcaaatgtctaacatgtcagatggtgataagaagcaaaatgtatcacatctgtaatcccagggttttgggaggccgaggtgggaggaaggcttgagcccattgagcacaggagtttgagaccagccttgggcaacatagcgagacactggtctacaaaaaattttaaaattaggcaggcatggtggtgtgtgcctatagtcacagctacttgggaggctgaggcgagaagatcatttgagcctaggaggtttaggctgcagtgagctatgattgctccactgcattccaggctgagtgacaaagcaagactctatttgataataacaacaaagagaaagtcataggggtcaggtatagtggctcatgcctataatcccagcactttgggaggccaaggtgggcagatcacttgaggtcaggagttcgagaccagtagtagagacatggtaaaagccagtctctgctactaaaaatacaaaaatcagccaggcacgttggtgtgtgcctgtagtcccagctacttgggagcctgaggcaggagaactacttgaacccgggaggtggaggttgcagtgagcctagatggcaccactgcactccagcctgggcgacagagcgagactctgcctcaaaaaagaaaaaaaaaatgaaagaaagaaaagaaaaggtcataggacagagaggaaagggatggttgggtgtttttttttttttttttttggtttttgtgggttttcttttagatggagtcttgctctgtcacccaggctggagtacagtgccaggatcttggctcattgcagcctcgacctcttggtctcaggtgatcctcccacctccacctcccaagttgctgggactacaggtatgtgtcaccacacctggctaatttttaatttaatttatttatttttgagacggagtttcactcttgttgcccagactggagtgcaatggcatgatctcagcttgctgcaacctccgcttcccaggttcaagcgattctcgtgcctcagcctcccaagtagctgggactacaggcatgcaccacctcgccccggctaatttttgtagtaatagaaacagggtttctccatgttggtcaggctggtctggaactcccgacctcaggtgatctgcccaccttggcctcccaaagtgctgggattataggcgtgagccactgcgcctggcctcacctggctaatttttgtacttttagtagagatggggtttcacagtgttgcccaggctggtctcgaactactggcctccagtgatctgcctgtctcagcctccccaagtgctaagatgacaggcttgagccaccacgccttgccaaggtgatatttcaggcaaggcctgaaggcaacggagctgtatggatgtctgagagaagagcattctaagcagagggaccgagcagctagtgcaaaggccctgaggtcagaccatgcctgctgagcgtgggacgtacccaggaggccagtgaggctgaacagagtaagccatggagagagagagggaggaggtgagggcagggaggtgacagggcaggtcatgcaaggctttgtgggctgtggcgaagagctgggctttttcctcggaatgaggtgggaaccatggaggtttctgagcagagcagggatgtgtcctgacttaggtgtgcacagatgtctctggccgctatagtgaggatagaaagtgtctgtgttggtccaggcaggagatgacagggctgtgtgaaagggtgggtgcttgaggagcaggtgagaagaggttggattctggatagctctgaaggcaaaactgatctcaagcagagaggcagcccaggttcctggccagagcacgtgggaggatggagcggagtcatgggataatcagaagcttggacaggccaggcacggtggctcacacctataattacagcactttgggaggctgaggtgggaggatccctgaggccaggagttccagaccagcctgggcaacattgcgagaccctgtctctactaaaaatacaaaaaattacctgagtgtggtggcgcgtgcctgtgatcccagctactcaggaggctgaggtgggaggatcgcctgagcccaggaggtcaaagctacagtgagctgtgattatgccactgcattccagcctgggcgacagagtgagaccctgtctcaaaaacaaaaaagcttagatgccgccgcactgagtatgagatgctcacgtgtgttggggggagacagatgtcacataggtgtgcagctcagagacaagggtttccagagggcttaacttttgggactcctcagtgtggagctggtgggtggggcctgaataaattgtccccagggcaccctgtgtagttgggaagagaagaggcctgtggctcgctctctttgtccactgcttggaatgggtagggtgggaccagccagcctttgggctggcagagacttcgagaaccacagggcttctttaggagtctgggtcaccccagggcatgacctggcgcctcaggccttgcctgtggtccaggtgtttagacagggcccctctgctggtggctactaggaggagagggcgcctttttaaggataagttgagttagtgaccagagccctgcctgcgagtcctagagtctaaggcagcagctacaattattggacaccaaatgtatatgatcacgctgactgtataacctcatgctgtctgtgtacacccagcactaaatgtatattcctgctgaggatacctccacaccacctgtataatgccatgttaaccaaataattggctgcactataaatatctataaatattcaagtagaggcaggttgtggcgtggtgactcgtgcctgcaatcccagcactttgggaggttgaggtgggaggattgcttaaggccaggagtttgagcccagcctgggtaacacagtgagatcctgtctctatttttattgtattgtatttttttttttttttgaggcggagtctcgctctgtcgcccaggctggagtacagtggcataatctcggctcactgcaacctctacctcccaggttcaaacgattctcctacttcagcctccccagtagctgggattacaggtgcccaccaccacacctggctaatttttgtatttttagtacagacagggttttgccttgttggccaggctggtcttgaactcctgacctcagtgatctgcccgcctcggcctcccacagtgctgggattacaggcatgaaccaccacacccggctaatttttgatttattgattgattgattttttgagacactcgctctgtcacccaggctggagtgcagtggcacgatctcggctcattgcaacctccgcctctcgggttgaagtgattctcctgcctcagcctcccaagtagctgggactacaggtgcacaccacaacatccagctaatttttgtatttttagtacagacggggtttcaccaagttggccaggatggtctcgatctcttgacctcatgatccgcccacctcggcctcccaaagtgctgggattataggtgttagccaccacacccagcctattttcttttttctttttctttttggagacagagtctcactctgtcccccaggttggagtgcagtgaggcaatcttggctcactgcaacctccacctcctgggtttaagcgattctcctgcctcagcttcccaagtagctgggattacaggcatgtgccaccacactggctaatgtttgtatttttagtagagaaggggtttcaccatgttggccaggctggcttagaaatcctgatcgacctgcctcagcctcccagagtgctgggattacaggcatgagccactgcacctggcctatgcctgctctttgaggtcagttttggtttcatactttagcctcattttgcagttgaggaaactgaggcttaaggaagataagccctttgttaagtatcctctagttcagagggtgcagaaggagcatttgaattcagggcgacccaggaggatgtgggctccacaagggtggagattgggtctctctggttcctcactgtatgcggtgccccgcccaaggcctgcacccactaagggctgaataaatacttgttctaagaccaggcccagtagtgcacgcaggtaatcccagcactttggggggccacggtgggaggagcccacgagtccaggagttaaagatgagcctgggcaacatagcaacatcccatctctacaaaaaaaattaaaaattagccgagtgcagtagagcacctgtagtcccagctactcaggaggcttagtcaggaggatggcttgaggcagggaggtcgagactgcgatgagctgtgattgcaccactgcactccagcctgggcaacagagggagatcctgtctcaaaaaaaaaaagcagcagacagaaagaaaactaatttcctgcacagcttggagaagttttcagcaccaacattccacagttggttgtctgggtttgggcagtaggccgttttccctcccagtgcctcagtttccacacctgcaaaacgaagccacggaaacgccctttcagggtggccaggggttctaggcggcatcgcccggtggcagggtgttcccagggtgaagccgcagggttcccgggtgggggcggggaaggctaaatgcggccggccggtgagtggcgggagcagctgcagccccgcccgcgccctcccgggtcccttagtctgggcagctgcccagctcgggccggtctgaccggtttgggccgccccgcctggcgctgtgctgggaggagccgccgccagtcgcgcggtcagtgcctccctccagactcgggagggtcgagggggcgcgggagagagcgcgggcggccgccggggctggtcgcctgcagggatgggggacgagcggccccactactacgggaaacacggtaggcagcgacccccgcccgtagccccgggccgacccctcggtccctcggagggggccttgagagaacatggggcgcagggaagggggctggagggggagcgcaattgcaaatctgcgcctggagcctccccaccatcagccaggccccttcaccccacttatcccccgcagcctcgcagacgaccctccttactctcccctacccgaaggacctgcccctgtacccctctgcctggcactgctgccggcgcctccttccccctatcccacctcagatcttccccatctccacctggttccgtggtggtcaccatttcagccctcttcccagtgggtggccgccagttaataagtttgttcacagttagtgatccctccttcctcccctgtcctggcctgccagaactgggggcttgggtgtggtcacctggaggtgggtgaggcagaaaattccacaggtctctgaattttattcttgccaaggcaaagacacccctaggggcttttgggagggggctctcccagccctgtcttggttcaggtctccaatcccatccatcttaatcttcttgactttcaggaacgccacagaagtatgatcccactttcaaaggacccatttacaataggtaagagctctgggttttggggggttctccccgctaatactaccccaatccctgtctcttcacaccccctcccatctgttctccaacaaactggtgacaaatatttgaaacttttttttttttttgagatggagtcttgctctgtcaccaggctggagtgccgtggcgcgatctcaatctcggctcactgcaaccttcgcctcccgggttcgagcaattctcccacctcagtctcccaagtagctgggattacaggcttgcaccaccacacctggctaatttttttttttttttgtacttttagcagagatgtttcgctgtgttgcccatgctggtctcgacctcgtgagctcaaagcgatccacctgccttggcctcccaaagtgctgggattacaggtgtgagttaccacacctggcctggacttaatttttaccatgtttatatttatttatttatttatttatttttgagatggagtctcactctgtcacccaggctggagtggtgcaatctcagctcactgcaaccttcccctcctggttcaagcacgtcttctgtctcagcctctccagtagctgtgactactcagaggctactcagaaggctgaggcaggagaattgcttgaatctgggaggtggaggttgcagtaagctgagattgcgccactgcactccagcctggaggacaagagcgagactctgtctcaaaaaaaaataacaaaaaaataaaatacagccaggcacggtggctcacacctataatcccagcactttgggaggccaaggcaggtggatcacttgaggttaggagttcgagaccagcctggctaacatggtgaaaccctgtctctactaaaaatacaagaattagctgggcatggtggcgggcacctataatcccagctacttgggagactgaggcaggagaatcgcttgaacctgggaggtagaggttgcagtaagctgagatcgttccactgcactccagcctgggcgacagagtgagattccctctcaaaaaaaaaaaaaaagtctagcttgggcaacatagcgagaccttgtctctacagaatgtatataaattaaaaaaaaaatgtgtggtggtgtgcacctgtagtctcaactacttgggaagctgaggcaggaggatcacttgagcccaggagttcgaggctgtagtgagctatgatcatgccactgtactccagcctggatgacggagtgagactctgttgcacaaaattaaaaaatgaaatgaaataaaaattaaaatgcatgtgccctttggtacggcattcaaacgactcaggaaaatttgtccaaataacacatggatgagggtgtttgcagagggcagatgggcccatggtgcacacagcaccaagcctcctccaaacactgcccctctgctccccaggggctgcacggatatcatatgctgtgtgttcctgctcctggccattgtgggctacgtggctgtaggcatcataggtgagtagagaatgagcaggacttggagttgcagggtaggcggaggcagccatggcctctggagtgggaacagggctggatctgaggagtggcagtgtctcagtatccctggatctttccacagcctggactcatggagaccctcgaaaggtgatctaccccactgacagccggggcgagttctgcgggcagaagggcacaaaaaacgagtgagttgactccttgcggcctggtggggctggggaagagggggcagaagattctaggcattccccatctctctaagtccagttaacaagtgcttataggctgggcgcggtgactcacgcccgaaattccaacactttgggaggccgaggcaggaatattgctttaggctaggagttcgagaccagcctggccaacatggcaaaaccccgtctccactaaaaatacacaaattagccaggcatggtggcacatgcctgtaatcccagctactcaggaggctgaggcaggagaatcacttgaaccacaggaggcagaagttgcaatgagccgagatcgtgccactgcactttagcctggggcacagagtgagactctgtctcaaaacaaacaagcaaaaattaagtggacgtggtggggcacacctctagtcccagctacccagcaggctgaggtgggaggatagcttgagctgggaggccaaggctgcagtaaggtatgattgtaccattgcactccagcctggacgacagagcgagacctggtctcaacaaaacaacaagaaaagaaaacaagtactgataaacgtcccactaccctcagccactagtctagtccttggggacacacagctctaaatgagatagtaagcatcctgttctctggcagcacacattttaagggcgggagagactgagaggggacagtcctggattacgcgtcaggtggtgatgaacaggtgagacaacagagcaagcatagcctgagtggcgtcacttcctggctctgtgacctagggcaggtgtctcaatctctctgaacctcgttttcctcatctctaaaatgaggatcataacagtcccaccctcatggggctattttgatggttagatgtgccaatacatgtacagagcttagaatgccacctggcatcgctgggcgtggtggctcacacctgtaatcccagcacactttgggaggctgaggtgggaggatcaagaccagcctagtcaacatggtgaaaccccgtctctactaaaaatacaaaaaaattagctgggcattgtggcatgttcctgtaatcccggttactcaggaggctgaggcaggagaattgcttgaacctgggaggcagaggttgcaatgagccgagatcgtgccactgcactccagcctaggcaacagagcaagactccatctcaaaaaaaaaaaaaagaatggcacctggcatagagttgctgatgctgcagtttttaaactattattattattattattactattattattttgaaacggaattttgctcttgttacccaggctagagtgcagtggcacaatctcagcccactgcaacctccgtctcccgggttcaagcggttctcctgcctcagcctcccgagttgctgggattacaggcatatgccaccatgcccagctaatttttgtatttttagtagagacggggtttcatcatattggtcaggctggtctcgaactcctgacctcaggttatctgcctgccttggcttcccaaactgctggtattacgggtgtgagccaccacacccggcctattattattattactattattattattttgacacagtgtctcactctgtcagccagtggcaggatcatagctcgctacagcctggaactcctgggcttaagcgatcttcccacctgggccttccaaagtgctggcacaagacaggcctgagccaccctgcctggccctatataagatatctttttttttttttgagacagagtctcgctctgtcgcccaggctggagtgcaatggtgcgatcttggctcactgcaacctccgccacccaggttcaagcaattctcctgcctcagcctcctaagtagctgggattacaggtgcccgccaccacacccagctaattttttgtatttttagtacagacggggtttcgccacgttggccaggctggtctcgaactcctgacctcaggtgatccgcctgccttggcctccaaaagtgctgggattacaggtgtgagttactgcacccggccatataaaatatcttaaaggaaacaataggccgggcacggtggctcacgcctgtaatcccagtacttagggaggcccagactggaggattgcttgacaccagcctgggcaacatggtgaaattctgtcgctaccaataatagaaaaaattagccaggtgtggttgcgcacacccgtagtctcagctgctcaggaggatgaggtggaggatcacttgatcctaggaggtagaggctgcagtgagccaagattgtgccactgctcgctctgtctgggcaacagagaaagactcttgtctcaaaaaagaaaaaaaaacaaaagaggccgggcgcagtggctcacgcatataatcccaacactttgggaggctgaggcgggtggatcacctgaggtcaggagttcgagaccagtgtggccaacatggcaaaaccccgtctccactaaaaatacaaaaattagctgggcatcgtggcgggcacctacctgtagtcccagctactcgggaggctgaggcaggagaattgcttgaacccaggaggcggaggttgtagtgagcccacatcacaccattgcactccagcctaggcaacagagcaggactccatctaaaaaaaaaaaaaagagaaaaataaaaaaagttttctatagggtggttaagaagtcttaacaggtcgggtgtggtggcttacacctgtaataccaacactttgggaggccaaggcaggcggatcacctgaggtcaggagtttgagaccagcctggccaacatggtggaaaccccatctctactaaaaatacaaaaattagccgggcttggtagcgggcacctgtaatcccagctactcgggaggctgaggcaggagaattgcttgaacccgggaggcggaggttgcagtgagccgagatcacaccattgcactccatcctgggcaacaagagcgagactctgtctcaaaaaaaaaaaaaaatcttaacagtttccattctcccttctctaactccaggaacaaaccctatctgttttatttcaacattgtgaaatgtgccagccccctggttctgctggaattccaatgtcccactccccaggtaacctggtccccaccgttccctttttcctctccccgcttcccatccttttccccctgtgaatgtgggctgcgacctcagtcctgagcagtctgccccaactccacccaatcccttccttctcccctcccagatctgcgtggaaaaatgccccgaccgctacctcacgtacctgaatgctcgcagctcccgggactttgagtactataagcagttctgtgttcctggcttcaagaacaataaagtgagttgtagactgtcctgagagcacaggtatgggcagtggcagtgtactagacttggggactcacctccctccatctctcttggcagggagtggctgaggtgcttcaagatggtgactgccctgctgtcctcatccccagcaaaccctgtgagtcaggggatcccaggaggctcaggtggtgacggggaggctctgcagaggctcagcctgactggtgccatcctctgctccatgcagtggcccggagatgcttccccgctatccacgcctacaagggtgtcctgatggtgggcaatgagacgacctatgaggatgggcatggctcccggaaaaacatcacagacctggtggagggcgccaagtgaggatattggcgcaccgcgccagggtctcactttgctgggtgggacaggcaatcccctgtggttggcctgatcatggaagagggtctgacccgagccttgtcctccttcccccaggaaagccaatggagtcctagaggcgcggcaactcgccatgcgcatatttgaagattacaccgtctcttggtactggattatcatgtaagtcaggagggaaggggcctctcccctggctgccccctctaagcctggctgagggtggagtctgttcatgaccgttttcttttccccagaggcctggtcattgccatggcgatgagcctcctgttcatcatcctgcttcgcttcctggctggtattatggtctgggtgatgatcatcatggtgattctggtgctgggctacggtgcgtcaccccctccctgtggcttctctttcctgaatccgcacactgccctgccctttcccgtggaaatggcccatcaggaaaacaaaaaaaagtcaggccgggcgtggtggctcacgcctgtaatcccagcactttgggaggccgaggcaggcagatcacccgaggtcaggagttcaagaccagcctgaccaacatggagaaaccccgtctctactaaaaatacaaaatcagccgggcatggaggtgcatgcctgtaatcccagctactcaggaggctgaggcaggagaatcgcttgaacctgggaggcggaggttgtggtgagccgaaatcacgccattgcactccagcctgggcaacaagagcgaaactccatctcaaaaaaaaaaaaaaaagaaaaaatgtctcagcaccgtagttaaggatgcatactctggtatcagaatagcagaggttcaaatcctggctttgccaattctttgggcaagtgcctcaacctaactgtgcttcaatttctttcttttttttttttgagacggagttctgttcttgtcacccaggctggagtgccatggcgcgatcttggctcactgcaacctccgcctcctgggtccaagctattctcctgcctcagcctcccaagtagctgggattacaggcatgcacctccatgcccggctgatttcgtatttttagtagagatggggtttctccatgttggtcaggctggtctcgacctcctggcctcaggagatctgcccgcttcagcctcccaaagtgctaggattacaggcaggagccaccgcgcccggactgcttcaatttatttctctataaaatgagggtaattcatatttctagttggcaaactaaatgacaaggaggtaatgagcagataaaatatgggtaggggcctgtttagttcaggcctgtggaatccagaggcacaatatcgtgctcaacaaaacagtgcttcatattttggatttttgttgtttttgagttgttgttttgttgttgttgttgagacggagtcttgctttgtcacccaggctggcgtgcagtggtgcagtctcggctcactgcaatctctgcctcccgggttcaagcaattttcctacctcgcctcccgagtatctgggattacaggcgcacaccaccatgcccggctaattttttttgtatttttagtagagatggggttttaccatattggccaggctggtctcgacttcctcgtgatctgcctgcctcgacctcccaaagtgctgggattacagacgtgagccaccgcgcccagccttgatttgttttttgagacagagtctcactctgtcacccaggctggagttcagtggcacaatcacagctcactgcagccttgacctcctgggctcaagtgatcctcccgtcttggcctcccaagtagctgaaaccacaggcaagcaccatcatgcctggctaaatttttaatatttttgtagagacaggttctccctatgtggcccaggctagtcttgaactcctgagcttgagcagtcctcccgccttggcctccctaagtgttgggattacaggcgcaagccactgtgcctggcccatattttgattattccttgaactttcctggaagaaaaatgcttggcaatccaatttgaggacactcatagtaaaatattcatattaatagtggtttctagctgggtgcggtggcgcacgcctgtaatcccagcaatttgggagacagaggtgggcggatcacctgaggttgggagttcgagaccagcctgaccaacatgtagaaaccccatctctatttttttttttttttgagacagagtctctcactgtcgcccaggctggagtgcagtggcgcgatctcagctcactgcaacctccgcctcccgggttcaagcaattctcctacctcagtctcctgagtagctgagattactggcgcccaccaccacgcccagctaattttttttttttttttttttttttgtatttttagtagacacggggtttcaccatgttggtcaggctggtctcgaactcctgacctcgtgatccacccgtcttggcctcccaaagtgctgggattacaggcgtgagccaccgcgcccggccaaccccatctctattaaaaatacaaaattagccgggcatggtggcgcatgcctgtaatcccagctgctcgggaagctgaggcaggagaatcgcttgaacccgtgaagtggaggttgcggtgagccgagattgtgccattgaactccagcctgggcaacaagagtgaaactccgtctcaaaaaaaaaaaaaaagagagagaacttagaccatggcagcatatgattatgattccaagtagggggaaagggttctggaagttctcttctgaaggtgacacttgagcagagacctaaggatgtgtgggatccagccatggggagagaatgcaccgggcggtgggaactgcaagtgtaaagtccctgaggcagaagcctcgatgtttgcttctgttaaatgggggcagttgtagctgctttgcaaagttgcaggaggcactgctggactgagcttgtggttcccccatgcaggaatatttcactgctacatggagtactcccgactgcgtggtgaggccggctctgatgtctctttggtggacctcggctttcagacggatttccgggtgtacctgcacttacggcagacctggttggcctttagtgagtcacagtctcccattcctgcccccacatgaggccttggagggagtggggagcccagccggctcagcctttgccctttgcagtgatcattctgagtatccttgaagtcattatcatcttgctgctcatctttctccggaagagaattctcatcgcgattgcactcatcaaagaagccagcaggtggggggccagggtgccaggggccaggatggagctgtccctagagttgtgtcttttgccctgacgcctgtgtctctgctcttccctagggctgtgggatacgtcatgtgctccttgctctacccactggtcaccttcttcttgctgtgcctctgcatcgcctactgggccagcactgctgtgtatctgcccccagacactgatctctgaccccagggatggctaaagaccaactttgcctagaagtgacctgcagcttagggatagggctggaaactggtgggagaatggattctttcccacaaaagtccctggggtcctcagtcctagacctctgcttccttaacgaacctccagcttcctgtccacttccaacgaagcggtctataagatctttgatgacagcccctgcccatttactgcgaaaacctgcaacccagaggtgggcgtccccggggtggggagggcaggtattgccccagcaggccccagatgatttgaaacctctcatgtccacttggaggttcagcaaacaattggcccctgttgcatgtcctgtgctaggtgtgggggaggacgcacagtggggaagagactctctaactggatcgaacaacttcccagggcaagctggcttcctctcttcaacttgaccaggccttcaccctgggtgctaaatcacccatttttccctacttcctttttttttttttttttttttaataagacagagtcttgctctgtcaccaggctggagtgcagtggcatgatctcagctcactgcaacttccaactccctggttcaagcgattctcctgcctcagcctcccgagtagctgggattataggcacacaccagcacaccaggctaatttttgtatttttagtaaagacagggtttcaccatgttagccaggatggtctcgatctcctgacctcgtgatccacctgcctctgcctcccaaagtgctgggattacaggtgtgagccacctcgcccggcccatttttccccatttcatttcctgtctccatgccctcttcttgaccccagtgatggccacgtcttgtttctagaatcccttcctttgcacaagccatattctgaactcttaattccttcccttaacttcaatccctatgtctcctgtcctacctcatggttttcctggccccacacctgatgctcagagcccactgtgaacccctggtgcctctttttggactcggttctcccttctctcccacagaccttcccctcctccaatgagtcccgccaatgccccaatgcccgttgccagttcgccttctacggtggtgagtcgggctaccaccgggccctgctgggcctgcagatcttcaatgccttcatgttcttctggttggccaacttcgtgctggcgctgggccaggtcacgctggccggggcctttgcctcctactactgggccctgcgcaagccggacgacctgccggccttcccgctcttctctgcctttggccgggcgctcaggtgggctggcgttgcaggcaggatggggtggaggacgaggcctggcccagccaccgaccactccctcggcccgcaggtaccacacaggctccctggcctttggcgcgctcatcctggccattgtgcagatcatccgtgtgatactcgagtacctggatcagcggctgaaaggtacgtcccacccacggttcgcattagctcctgttgcggggcgaggctgaatagcgaaccaggattgggtcttgcttggaggtgggcggggccaagataatagagcagtgatgggtttctgtctatgacggggtggagttcaggagttggcgtgattgagtcctgcgatggaggagcaaaccagagaacctactgggtggaattcttgctgttgaggggacaggcccaagaggcctggcccaccattggttattaccagagtgaattggagtggtatatatttgcgctgaagagagcaggaataagactggtttattagccgggcgccgtgactcacgcctgtaatcccagcactttgggaggctgaggcgagcggatcacctgaggtcaggagaccagcctggccaacatggtgaaaccccgtctctactacaaatacaaaaattagccaggcatggtggtgtgtgcgtctgcagtcctagctacacgggaggctgagacaggagaatcacttgaactccggaggttgaggtttcagtgggccgagaccgagcgactgcactccagcctgggcaacagagcgagactccatttcaaaaaaaggaaaaaaaactggtttatttttcttagaggaagggctctggggctgggattgatggtactttgttttagagacaggatctctcaccctgtcacccaggctggagtgcagtggcaccatcatagctcactgcagcctcaaactcctgggcttaagtccctgtctctttgacagcgtggactcaggagacctggacattggcaagtgtgtgtgatagggaagaggggatcccttccaagtcaggctggtgtcccctcacttccacatcccttcccttctcttccagctgcagagaacaagtttgccaagtgcctcatgacctgtctcaaatgctgcttctggtgcctggagaagttcatcaaattccttaataggaatgcctacatcatggtgagtgggcctgggacccccaaccaacccgccagctcctgctgggtgagaggaccaccccccatgcccacccagtgggtctgatctctccctcccactctcctccagattgccatctacggcaccaatttctgcacctcggccaggaatgccttcttcctgctcatgagaaacatcatcaggtcgggaatcattatcatcttcctcctgccacccgcctcttcccctagtccctgaagccagcattcacacctgcccctcactgtcccctgcagagtggctgtcctggataaagttactgacttcctcttcctgttgggcaaacttctgatcgttggtagtgtgggtgagtgccgcccacctagcctctcggggtgtgggagcctgatttctgtcttctgtgatgagtgtcatcttcttaggaggctgtttcctatatccagaacccttcgccatcttgctttcttctccttctccagggatcctggctttcttcttcttcacccaccgtatcaggatcgtgcaggatacagcaccacccctcaattattactgggttcctatactggtatggacctctggggagagatgggggtttgggaagaaagaggtgttgggatttgcttggtcttctttgactagataaatgtggatagaggtcagaggtggggaattgattatttattcagaccacaaactttttgtttgtttttgaatcaagagtcttgccctgtcgccctgactggagtgcagtggtgcaatcttgactcactgcaacctctgccttccgggttcaagcgaattctcgagcttttgcctcccgagtagttgggattacaggtgcctgcccccacacctgcctaatttttgtatatttattttttaattttaatttaattttttttttgagacagactcactctgttgcccaggttggagtgcagtgaaatgatcttggcttactgaaaccttcacctctctagttcaagcgattcttgtgcctcagcctcctgtgtagctgggattacaggcacctgccaccacacctggctaacttttttttttttttgagatggagtttcactcttgttgcccaggctggagtgcaatagggtgatctcagctcactgcaacctccgcctcccaggtttaagtaattctcctgcctcagcctcccgagtagctgagattacaggcacgagccaccacgtgtggctaattttacatttttagtagagacggggtttctccatgttggtcaggctggtctcgaactcccgacctcaggtgatccacccgcctcagcttcccacagtgctgggattacaggcgtgaaccaccacacctggctaatttttgtatatttaatagagatggggtttcaccgtgttggctgggctggtctcaaactcctgacctcaagtgatccgcccgcctcgggctcgcagagtactgggattgcaggtgtgacccaccacgcccgacctcagaccacaaacattatcaagcacctactgtgtgtcaggcatcgaggtggagggcttccctctaaaggccttagagtttgggggtaaacagatactcctccataatgatattggtgaatgtatgattgcaaactgggacatgccacgagtatgtctgtatagcacagggaactgtttgaaactgtggtgggggctgggcaggtgtggggggggtccaggtggtgccatgcaggtgatgttggatctgagatctgaagctgcaggcaatatccaggcagagggaacagtacagtggccctgaggtgggagtgtgccaggaagcagtggggctgacgtggaaggagtaaagaagtggagataagggccaggcaccgtggctcacacctgtaatcccagcactttgggaggctgaggcaggtggatcacctgaggtcaggggtttgagactagccttgccagcatggcgaaacccagtctctacaaaaaaaatacaaaaattagcggggcgtggttgtgggcacctgtaatcccagctactcgggaggctgaggcaggagaactgcttgaacctgggaggcagaggtttcagtgagccgagatcgcgccactgcactcgagcctgggtgacagagtgagactctctctcaaaaaaaaaaaagtggagatacggccaaggaggttaacaaggctgtggagggattgagccttcattgcaagggcagtattgtatctcagtgtaggtcttgaagcccattgacctagtttcttattttagttcctctatttagtagttctaagatgagtaagagtaatcttgggcaaattatttaatcctctaaggtccactgacttttttttttttttttttttttctgcgatagagccttgctctgtcacccacgctggagtgcgatggagtgatctctgctcaccacaacctccacctcccgggttcaagcgattctcctgtctcagctccctgactagctgggattacaggcatatgccactgtgcccggctaatttttgtatttttagtagagacggggtttcaccctgttggtcaggctggtctcgaactcctgacctcaggtgatccacccacctcggccttccaaagtgctgccaataaaggcatgagcccctgtgcctggccatttcattgttttgaatttttaatttaatataatagagataggccaggtgttgtggctcaggctctactataataacaataataatagaggcagtgtctccctatattgccaggctggtcttgaactctggactcaagggatcctcctgcctcagcctgccaaagtgcaaggactacaggcatgagccaccacgcccagccaggtccactgacttcagtcaacaaatgtttatctagcagctaccaaggccgtgtgagtctccagattgctagggatgcagcagtaaatgggactgggtctagtgaggatgtgagcattaaacctgaaagccctaaacatgcataaaattgcagctgcaccaagagctcaggaggggtgcccagtgctaggaggacataaaataggctctagaggccgggcatggtggcccacacctgtaatcccagcactttgggaagccaaggcaggcggatcatgaacgtcaggagattgagaccatcctggctaacatggtgaaaccccatctctactaaaaatacaaaaaaattagtcaggtgtgctggtacgcacctgtagtcccagctactcaggaggctgaggtaagagaatcgcttgaacccgggaggtggaggttgcactgagccaaggtcccaccactgcactccagcctgggtgacagagcaagattccgtctcaggagggaaaaaaaaaaggctctcagccagacgcaggggcccacatgtataatcccagcactttgggaggccgaggcaggcagatcgcttgagctcaggagtttgaaaacagcctgggcaacatggcaaaaccccatctccacaaaaaaatacaaaaattagctgggtatgctggaacatgcctgtagtcccagctccttgtaagcctgaggtggaaggatcacttgagcctgggaggtcaaggctgcagtgagctgagatggggccactgcactctagcctgagcaacacagtgagaccctgtctcaaaaaaaaaacaaaaaaaaaacgcccactctaggtgtcgtaggtggtttcctggaggaggtgggacttgaggacttgctctttgagctgaaagcagaaggtcgatggggcataaattagatttaagtcaggacaatagcacatgcagaggcccaggggttaaagaaagcaagggtgaggctgagtgcagtggctcatacctgtagtcccagcacttggggaggccaaggtgggcgaatctcttaagcccaggatgggtaatgggtaacgtggcaaaaacccatctctacaaaaaatacaaaggttagccgggcacagtggtgcacatctgtaatcccaactactccggaggctgaggcgggaggatcacttgagcccaggaggcagaggttgcagtgagctgagattgcaccactacaatccagcctgggctacagagtgagaccgtgagaccctgtctcaaaaaaagaaaaaaaaaaaaggccgggtgtgcggtggctcacgcctgtaatcccagcactttgggaggctgcgaggcaggtggatcacctgaagtcaggcgtttgagaccagcctggccaacatggtgaaaccccgtctctactaaaaatacaaaaatgagccaggcgtggtggcacgtgcctgtagtcccagctcctccggaggctgaggcagaattgcttgaacctggaaggcagaggttgtagtgagccaagatcgtaccatggcactccagtctgggcaacagagtgagattccgtctcaaaaaaaaaaaaaaaagacggagagagagaaagaggattttgtgtggatggtggggccctgccagcgggggtgaggggttgggatgtcactaatccaaagagggtttctcagcaggggaaggatgtggtcccagcataggatggactcagggggtgggggctgctctgggaaggacacggagcagggacagctcgtttctccttgcccagacggtgatcgttggctcctacttgattgcacacggtttcttcagcgtctatggcatgtgtgtggacacgctgttcctctgcttctgtgagtgacccctcaccccaaaccttgctgggccccgaatcccttctttccactgggcatcacatcaccctccaacggggcaacacgcttgcctgcccccagcttccccagggcttggctgtccctcgtcctgggtccccagcctgtcttcctggtttccttttgcgcttagaagcagctccgacctcctgtccactggcccaggctgcagcctggacgctgccctggagcccgcccgcgcttcgcagtttctggctttgactggggggaggggatctgtggctgccactaactctggtctctccatctgttttttttgtttgtttttttcttctctcttcctctcctccatgcctgctggcttccctgttcttccctgcctccctctttccctcccttcccgaccaccccattttccccctgccggttcccggggggagcccaggtgaggacctggaaaggaatgacggctctcaggagcgaccctacttcatgtcgcccgagctgagagacatcctgttgaaggggagtgcggaggaggggaagcgggcagaagccgaggagtagagagtgagggagactggcgtgggggccaggtttcctccatgtagactgggggtgcatgaagcgggggggttcctggcctgcgagtgtggggatcctgtgtgtccctcggagcccactacagtctgcccctctctggtcccagtgtgtctgctttctaaccctctgaggcttctctgtgaccctcatccacctaccctgtccttgaggcccctgcccgtgggctcccctcatgcctcctgctctgggacctctctccacagtggaggacctggagaggaatgacggctcggccgagaggccttacttcatgtcttccaccctcaagaaactcttgaacaagaccaacaagaaggcagcggagtcctgaaggccccgtgctccccacctctcaaggagtctcatgccgcagggtgctcagtagctgggtctgttcccccagccccttgggctcacctgaagtcctatcactgccgctctgcccctccccatgagccagatcccaccagtttctggacgtggagagtctggggcatctccttcttatgccaaggggcgcttggagttttcatggctgcccctccagactgcgagaaacaagtaaaaacccattggggcctcttgatgtctgggatggcacgtggcccgacctccacaagctccctcatgcttcctgtcccccgcttacacgacaacgggccagaccacaggaaggacggtgtttgtgtctgagggagctgctggccacagtgaacacccacgtttattcctgcctgctccggccaggactgaaccccttctccacacctgaacagttggctcaagggccaccagaagcatttctttattattattattttttaacctggacatgcattaaagggtctattagctttctttccgtctgtctcaacagctgagatggggccgccaaggagtgccttccttttgctccctcctagctgggagtgacgggtgggagtgtgtgtgcccaggtgggggtgtctcctggctgggaaggagggaaagggagggagagttttgcgggggttggcagtggagagcaggctggagaggagatggctaatagctgtttaatggaaacctgctgggctggagggagttaggctgaatttcccgacttcctctgccagttattgacacagctctctttgtaagagaggaaagaaactaaacccacccaagggatgatgtcagggggagaggtggagggcagatgtcctgggcaaaccgggcccctctgcccacacacctcacttgatccttttgccaaacttgtcaaactcaggggaactggcttcccagttgcccctttgccatattccaagtccccctcagacttcatgtctctgctcatcagcactgtcccaggatcctggagagggagaactcctggccccaggggaaagaggggggggtctcccgtttcctgtgcctgcaccagccctgcccccattgcgtctgcacacccctgcgtgtaactgcattccaaccactaataaagtgcctattgtacaggtccaggcctggtgtgtttgttgggggcagtgagccagtggcggctggtagggggaaccccagcttccaaggccctaggagtctctgaactagggcgattctctcaaagggaacgaggagggggcaggaaacccactggctgctggctctgcctgaattccaaccttcaggcagctcagatttcccgattaggctctaatccctggactccagaaggcagaggcagcctgtccacctccgccatcacccatcctggacacacgcccccaggcctcccctctctcagggcccaggcacctgaggtcctgcagtcactatgctccccagctactttggatctgcgaagggactgactgcccttggggtgggccccactgcctggaagctcgctgctgccccctcgtgccagctgccagtgtcagtcacctccaggcaatccgccccaacatttcaattctttccacctcctctcagggaatttttcttcaatatccacttttttttttttttttttttttcagacagtcttgccctgtcacccagggtggagggcagtggtgcgatctcggctcactgcaacctccacctcccgggttccagcgattcttctgcctcagcctcccgagtagttgggattacaggtgcctgccaccacgcctggctaattttttgtgtttttagtagagaccaggtttcgccatgttgggcaggctggtctcaaattcctcacttcaggtgatccgctggcctcggcctcccaaagtgctgggattacaggcgtgagccacctggcccagccttttttttttttttttttttttgagacaggatctcactctggctgaagctaaagtgcagtggtgcaatcatggctcaccacagcctcaggtgatcctcccatcttagcctcccgagtagctgggactacaggtacacaccaccacacctgactaatttttgtattttttgtagagattgatttttaccatattgcccatgctggttttttttgtttgtttgtttgttttttgagacagagtctccctttgtggcccaggccacagtgcatagtgccacagtgcagtggcacagtctcagctcactaaacctcctggattcaagtgattctcgtgcctcagcctcctgagtagctgggattacaggcgcgtaccaccacatccagctaatttttgtagttttagtagagacggggtttcaccatgttggctagcctggtctcaaactcctgacctcatgtgatccacctgcctcggcctcccaaagtgctgggattacaggcatgagccaccaagcctggccagcatttttgtttgtttgtttccaagaaggcatttgaacccaggtcttggctccagagtcctcaagttctaccctatgctggcactgaccccttcctcgatgcctttgtttccctggatcctttgaatctggcattttattcagccccagctcctgttaccatgcccacctaaaaaatagctcctggcggccgggtgcggtggctcatgcctgtaatcccagcactttgggaggctgaggcgggtgaatcatgaggtcaggagtttgagaccagcctggccaacatggtgaaaacctgctgctactaaaaatacaaaaattagccaggcatggtggcacatgcctgtaatcccagctactcgggaggctgaggcaggagaatcgcttgaacccaggaggcagaggttgtggtgaaccaagatgacaccattgcactccagcctgggcaacagagcaaaactctgtctcagaaaaaaaaagaaagaaagaaaaagatttgtggtacgatacatatagcataaaatttgccatctccatctctttcttatttattaagccactgggtctcactatgttacctgggctggccttgagctcccggactgaagggatcatcccgcctcagcctcccaagtagctgggatgacaggcactcgccactgtgcctggtttatgtttaattttttgaggaaccaccatagtgttttctggcttcatgctttggctccacttctgggttggcttcactctctgccaagttcctttatctgggtatattccctgcctccaaccacactgtgctgtgatagttaattttaggtgtgaacttggctggattagaaaatactcagatttgagctgtgatgtggtaaaaataagacaaagaaaaaaaaaaaaacagtggctgggctccgtggctcacgcctgcaatcagcactttgggaggccgaggtgggcagatcgcttgagcttgaattcgagaccagcctgggcaacatgtggaaagcttgtctcaacaaaaactatgaaaattagcagggtgtggtggtcatgcacatgttgtcccagctactcagtaggatgaagtgagaaggtcactttagctcagggggtggagggtgcagtgagctgagatcacactactgtgctccagcctgagcgacagagcaacacgtctgataaagcattatttctgggtgagcgccatccaacttgctggggctccgacagaacagaaaaaggagagaaagcattttcctcctcagaactgggacactcttctcctcctgtcttgacactccaagacttataccagtgatccctggttctcaggccttcggccttggactgggaattacaccattggtgtccctggctctgaagctttaggattcagactgagcctcgctactggctttgcagggtcttcagctactggagctgctggcttttcagggtctgcagtcaatgcatgtggtaggacatctcagcctccatgatcacatgagccaattattctgctaaatcccctctcatctacctacctcctattagctttctcggagaaacctagtaatacacacatcatacattttcctggcctttttttttttttttttttttttttgagatggagtcttgctctgtcactcaggctggagtgcagtggcacgatctaggctcactgcaagctccgcctcccgggttcacgccattctcctgcctcagctcctgagtagctgggactacagctgcccgccaccacccccggctaatttttttgtatttttcgtagagacagggttttaccatgttagccaggatggtctcgatctcctgacctcatgatccgcctgccttggcctcccaacgtgctgggattacaggcatgagccaccgcacgcagctacattttcctggctttaagatgagaagtcttctctttttttgagacggagtctcgctctgtcgcccagcctggagtgcagtggcatgatcttggctcactgcaacctccgcttcctgggttcaagcaattctctgcctcagcctcccgagtagctgggattacaggagcccgccaccatgcccggctaatttttgtatttttagtagagatggagtttcaccatcttggccaggctgctcttgaactcttgaactcttgatccacccacctcggcctcccaaagtgttgggattagagggccagaaaagtcttttcttgctcctaagtctcaggcctggagctcactgactctgaccagcctgattatgatcatttactcattgtaaatcattgagtcaatcattgtagtcaaggtgtgggcctagtttgggagtcaggcagcagggacctgccatctagactacagtttgatcaagggagaggaatggttccccaacaactgtggtcatcccacagtgtccatcccagagtggtcacccatgtccaccctgggggggggcaagaagggaacaggcataggacaaaaagctttcgagagggaagttaactgggtgtgattgggagagtgggtggaatctttcaagatgaggaagacaatgaatagagaggctgtaaggacagcagagtcactgagagtgacaggacctgtctagactgacagattacaagagggggatgacctcaatcttcaaccaatgagtgggagggagggaagagagaaggaatagccagatgacagatgatgtcactaaggcaaggaggagagaatggtgttgtatacagggtttgtgaccactgagtggtggaaggacaagggcagaggtgcgaggtcgggtcagggtagcagttcagcaagacagggcagatggcatcttgtgtcttccatcctttacggtgaccagggactaggaacctgatggatggggtttattggaaagttgggctgaaaactttttacttcaaaaaatttttttctttttcctttttttttttttttgagacgaagtctcactcttgtcccccagtctggagtgcaatggtgcaatctcagctcactgcaacctccgcttcctgggttcaagtgattctcctgcctcagcctcccgagtagctgggattacaggtgcgtaccaccacgcccagctaattttttatattttaaggagagatggggtttcaccatgttggccaggctggtctcgaactcctgacctcaagtgatccacccgcctcggcctcccaaagtgctaggattagagggtgaaccaccacacctggccctttctttttttttttagacacagtctccctgtcacccaggctggactgtagtggcttgatctcggctcactgcaacctccacctcccaggttcaagcgattctcgtgcctcagcctcccgagtagctggaattacagatgccagccatcatgcccagctactttttgtacttttagtaaagacagagtttcaccatgttggccagggtggtcttgaactcctgacctcaagtgatccaccaatctcggcctcccaatgtgctaggattacaagtatgagccactgcccccagccttctttttgtttttattcttgaaaactttttttttttttaatgtagagatggggctgggtgcagtagctcatgcctgtaatcccagcactttgggaagccaaggtgggtggataacttgaggtcaggagtttgagaccagcctggccaacatggcaaaacccagtctctactaaaaatacaacaattagctgaccatggtggtgtacgcctgcaatcccagtgacttgggaggctaaggcagaattgcttaaactcgggaattggaggttgcagtaagctgagattgttatcactgcaccctagctgggactacagaacgagactccatctcaaaaataaataaatagatagatagataaaaaacatagagatggggtctcactatgttgcccagactggtcttgaacttctgggctcaagcaatccccctgcctcagcctcccaaagtgtaggattacaggcatgagccagcatgcctggccaagacaacatttttcaggaagttctggttggatggggcacccgttcaagaggtaacaatcataaccattactgtttttgaagctttaactccatgccaggtactgaagcaaccccttgatgttgaattaactccgaatcagtcctcctccaaatcaaaccctaggaggtttgggtttgatccaaagactgtgcttgtcatcatgaccctatccgccctttactgtgtttggggtccctggggcaagaaacgccttagcggaatgagatcttcaaaagcgttttaagtaaccttaggctctctggagttgggagtcagaaaactagtaaccatcctcgttctgccatttggcagtgctgttagctcaagcaagtcactaaaactgacctgttccgaaaaaaagccagtctaggctttgttattaacattcgttattatcacagtgaccttcaacaatttaaagctttaaccaattttttggttttgtttttgtttttttgagacagggcttctgttgcctaggctagagagcagtggcccaatctcagttcactgcagcctcaacctcctgggctcaaatgatcctcccacctcagcctcctgagtagctgggactacaggtgtgttccaccatgccctggcattttaaccaattttatcttagtgcatgccccaatcatcttaccaaacctttcttcaatttccagctctatttgtgagacagatctgaggcacaggaaatgaaattaaaaagcctggtgcagaataacttatcaatttatgtgaaaaacaagaatatgattatgcacctctgaaaataaaactctactgtagttacacaaaaaactgtacaatggctggtcgcggtggctcacgcatataatcctagcactttgggaggccgaggcgggtggatcacgaggtcaggagatcgagaccatcctgactcacccggtgaaacccagtctctactaaaaatacaaaacattagccgggcgtggtggtgggcgcctgtagtctcagctactcgggaggctgaggcaggagaatggcgtgaacccaggaggcggagcttgcagtgagccaagatcgtgccactgcactccagcctgggagacagagcaagactccgtttcaaaaacaaaaaacaaaaaacaaaactgtacaatggcttctaagagggagggaactggatgtctgaggaagactttgtgctctcatgtctttggcacttttttttttttttgagatggagtctcactctgtcgcccagactggagtgcaatggcacgatctcagctcactgcaacctctgcctcccgagttcatgccatcctcctgcctcagcctcccgagtcgctgagactacagatgcccaccaccacgcccggctaatttttttttgtatttttagtagagacggggtttcactgtgttagccaggatggtcttgatctcctgacctcgtgatccgcccacttcagcctcccaaagtgctggaattacaggcgtgagccaccgcgcccggcgtctttggcacatttgacgtatcatgtgactatgctacctattaaaaatccacagtaaaatgtaaataaaatagaaaagcagagggtacagcatgcactcatttcttttttgagacggtctagctgtgccatccaggctgaaaagtgcagtgactccatcacggctcactgcagcctggacctccacagctcaagtgatcctcccacctactcctcccaagtagatggaactatggacacaggccatcacgctcagctaatttttgtagagactgggttttgccatgttgctcaagctggcctcaaactcctgggcttaagggatcctccagcctcggcctcccaaagtgtggggattacaggcgtgagccaccatgcccggctaggcactcatttctgtaattgttgcaggaaacaaaggaccagagagactgacacgggaaacaggaggatttatttagatgtacaccggctcagtggatttgtatctgaaaagctgaccattgaacaaagactgagtgtggtttttataggcaaacttacagaagcaaaacaaaagcagttaatgatacagtcacaggtcatgtaatctatagcataactgctgacttagcataacttgtggctttgcacagctgttggccttgcagctgtgtcaaaagaaaaacagagtctacaaatcttactaaatacaaccattggcaaacagtcatatttaatggttcagaaaaggagagacagtaaaggaatttttcttttcaactttgctccggaggaggctgtctggagcccattcctttggcctcgacttttcagtgttataactgtccttgaagtaagctggctaagcagaggaaaacttgttcttgttttctttttaacccttaccccctgccacataatcacatctttacacttcttttttttttttttttttttttttaagatgggaagtcggagtctcgctctgtcgcccaggctggagtgcagtggtgccatctcggctcattgtaacctctgcctcccaggttcaagtgattcaagccattcttgtgcctctgcctcctgagtagctgggattataggcgcacaccaccacacctggcgaatttttttttttttttttttttgaggctgagtctcactctatcgcccaggctggagtgcaatggagcaatctcggctcactgcaacctccgcctcctgggttcaagcgatcctcctgtctcagcttcctgattagctgggattacaggcgccctccaccacacccagttaatttttctatttttagtggagacggtgtttcaccatgttggccaggctggtctcaaactcctgacctcaagtgatccgcccacctcagcttcccaaagtgctgggattacaagcgtgagccaccacgcccagccaggaaacccattttcaacacctccttgctcttttttttttctgagacagagtctcgctctgtcgcccagactggagtgcagtggcgcaatctcggctcactgcaacctccgcctgccaggtcaaacaattctcctgcctcagcctcccaagtaggtgggactacaggcatgtgccaccacacccggctaattttcttttgtatttttagtagagacggggtttcaccatgctggccaggctggtctcgaactcctgacctcgtgatccgcccgcctcggcctcccaaagtgctgggattacaaacgtgagccaccgcgcctggccttccttgctcttcttgctccaaatcctgggaacgtctgaatcaacaggcggacatctgtcaaaccttcctagcaactacgcctgcggatggccaacctgaccctggaagacagtggggtttagttaagcacagattgtacatcgggggcctcataaggcgcctggaagcattcaagaacaccacgcttgtaaggacaaagcactcggtcacgggcgcctttacttcggagctccgcgctgctgctggacgagcgtccgttgagtcccagccccaatttttccaggaaatggcggtgagccctctagtgagatattttttggcctgggcctcagtttctccatctgtcaatgggggaaggggaaggcgggctagaggaccccgaccaggtcggctgcagccttcggaagctacggcccagggacgccacaccaaggcaggtctgcgggacgaaagaacccaagaacccgggcgcgcattggcgccggtcccgggctcaaggggcagcaacgaggagacgctggacctggccgttcctcgcacacatctctaaccttctgtgcctctcaagggagatggggtgagcatagccacctccactggagcccgaaaatccccggccgagataccgccactaaaaaggtacacatgcgtcaaagcctctcggagccatttccgctaacgtactcagggcgacgggcgtaagatggcggccgcgcaggcgcaaaatgtcgcagccgtagggaggctccgcctctgacgcttgccttgcatcacgtggtaatggccgctcaaaaaacgccttagcgaaaaccagagcgtgccctcgtcacgtgatggaggactcccagtacggcaaagggaaggcgccaaaagttgtcagatggcgaaggaaaccgcgaaattcgccattgtcacatgatggagcaacctatcgaaagcggagggaaaggtgccgaagtcacgtgactacgcacgcaaacactcccgcttgcaccacgtgcaactcacgcccaccccctcagccccccccttatctcttttcgcccctccctcccatttgggttgggcctgcgtcgaggcgcaacgcggcgtcaaagggggcggggcttcagccggtcacgtgttcccgcacctccccggcgcgcgcctgcccgcccgcccgctcgcccccggtccggactcctcctcctcctcttctcgccattgcagttggacccagcagcccggcgcgcaccgcgtggcttttgggggcagaccccggcgggctgtggcaggagggcggcggcggcggctgcggtcgaagaaggggacgccgacaaggtaagcgtcaatgtggcggcggccgggcccgctcccgcctctgcccctccccccgcccgccctcagtgagatccccactgagggttcgcggtgacaaggctggagggatcccacgctcgccgcctccgcccggttccctcatcccggcgcctggcccgttcctcccttgccggcctcgctcccgcgctcggccgttaactctcttccattgtgcggaggaaacaaaatggcggctgcggcggcggcgaggactcggtgcgcgcgcagccgctcccccccgcacgcggcccctcggccggcggcggcgccacgcgcgggggggtgcgcgcgcaccgggcccccggctgccgcctccccgcggctgggcttttgtctgttgcgggggtcctggggacgcgcgcacgtgcttggagcacacaccccctcgggtcccgagttccgcggcggggcgaccccccttcctcactccttccctaccccctcctcctctttgtcccggtcccgcccccgattccaggagagtcccaggttcccgaggcgggaaaagtcgcctcctttgtcctcacaggtcgcggagaggcggaccccctccttggaagccccttcccacgcggattgctgaggaagcctttgtgggttcgtcgggtttccaaatctctggtcagccaggcctctctcagatcagggtcaaaacttgagagggtttcagctttttctttagttagtttgttttcattgttgaatgtttttccagattgttagtatttgccttctctagaccggcaatctacttgggtgcaagcctgggccccgaaacgtggatgcttaaaacccatttctacctttattttctcaagtagttgaacgattgagattctcgaggttactcatgaggttctgccccagttaattcaccgcctggatgaattatttggggtgtacggcggtctgcatgctcctcccccagttcagtggccaaatttgaggagaatgagggatctcttctccacatttccaacattgtttgccagttgctgcttaggtgacatggatcagcaacgaagcgtcggtttcagtggtttctttttctggactccggtaattcactgctgctgaatctttttcaagattttgctctctttaaaatgagtggtgtgatggcatatttgtggtccacatggaatcgcgaggtgccatccgaagttaggattcaaatttaggactttaagctctcttttcctcaggtatttgtggatgggaatctccatggattgctcagagtgctgccactgtcccttgtgcgtgatgctttgtgtgtggtctcgtgggatgtagttacagtagccgcccagactgtgaatgaagtgtgggaaccagggcctcattcacagctggaaagcaggaggaggccgcaggacattggcaggtgctcctctccctgttccgtggtgctggggccccttgcttatgtgggtggctcttggtccctgggatttgtgaatggagtctgcaggccccagtgttgtctggaatattctttagttcagattggaggctagcaatgactgccaggcttggccttgccgccactgggcgctatttatcactctccctatcttcctggagcttagccgagtcttcctggagctgagaggtgcctaattgtttgtggtttttctgattgaacttgtttggtgcctctaggcaaaaattcctttggctccttctagtattttcagggtcttgaaggcccatattcctgagcatgaggaatctaagtctgttattttttcctaaattttcatgttaaataccacgttgacaaaggacagctgctaatattttgatcacacagatacagacggtgctccctggttaaggcctccaggtaggggacaggtagagtcagtgatggggaagaagccttctgtaagtccctttcctttgggtagacagtagattaccctttaggctttagcaagatgtgggggttagaagtcttctattcttggaaaagcctttagtcgttttctttgggctggggcctcttctcttagggactgctgtcaccctttctcggtttcttttgattacctttcatggccccagaggagtgatcccttcccttatttatacctcttggacttgtcatcctgctacattttgtcagcaagttaattcaccttgtgcagttttgaaagatgtgtaagtgttaacatttagtattagcatttatggcccaggaaattgtgaccttaatatttgaatcttgcttttattaaacctttacaggaactaggattttgtagggttttttttttttttttttttttgagttagagtttagctcttgttgcccaggctggagtgcaatggcgcgatctcggctcaccgcaacctccacctcccgagttcaagcgattctcctgcctcagcctcccgagtagctggaattacaggcatgctccactacacctagctaattttgcatttttactagagatggggcttctccatgttggtcaggctggtctcgaactccgaacctcaggtgatccaccggcctcggtctcccagagttgtgggattacaggcgtgagccaccatgcccagccttctaggttctgtttattggatgctttttatcttaacaaagtcctggcagagaaagatttgatttgtttccatcaggaagtttggaatctgaggcagatagtggtttgagtgtcatcttcacacaatgaatgagtagagatttggggcctgggaggcacgaggcaaactttagtttcctactgaagcatttgtccgttttatctgaaacaagtagattgccgatctgtattattatacatagtaagctgctgttgaaatggttgtgaaagtagagtaggcaggtaggtggtggttagggggcctcatcggtgctgatttttaagaaatttttatgatatttatgatctgttataaatccttgtgaaacttttccatgagaacacttcacgggtgattccattatgaatagcaattggtggccgggtgcggtggctcacgcctgtaatcccagcactttgggaggctgaggtgggcggatcacgacgtcaggagttcgagaccagcctgaccagcatggtgaaaccccgtatctactaaaaaaaaaaagtacaaaattagccaggtacggtggcacacacctgcagtcccagctattcgggaggctgaggcagcgaatcgcttgtacgtaggaggcggaggttgcagtgagctgaggtcgtgccgctgcactccagcctgtgtgatggagcaagacttcgtatgaaaaaaaaataataacaattggaaattcagatacatttagcatcagctgtatttaggcatcgtgtaaaagtgatgtccagttaaaatttaatttaatttttttttttgagacagggtctcactctgtcacccaggctggagtgcagtcgcgtgatctccgctcactgcagcctctgtctctgaggctcaagaagcaatcctcccacctcagcctcccaagtagctggaaccacaggcacatgtcaccacacccagctaattttttgaattttttgtagagacaggatctttccacgttgcccaggctggcctcagaactcttgggctcaagcaatctgcccaccttggcctcccaaaaagctggaattactggagtgagccctcactcctggccagaatttaccttttttctcttctcattaaatgtttacgtagtgaagacattgaaaatgtagctactagttttttttaaatttttaatctaattttatttttttgtagagatagggtcttaaactatgttgcccaggctggtctcaaattcctaggctcaagtgatcctcctgcagcctctcaaagtgctgggattacagatatgagccgccttgcccagtggcactaattttaagacaaaaatatgtttactgtctgagggccattctcttgtggaatgcgtgatcaccatgtatcatttagtcataaagttgaatgtattacagtatgcaaatttgctccaaattatttttataattttaagtgatagtaagaagttctggccaggcgcggtggctcaggcctgtaatcccagaactttgggaggccgaggcgggcggatcacaaggtcaggagatcgagaccatcctggctaacccggtgaaaccccgtctctcttaaaaaatacaaaaaaattagccgggcgtggtggcgggtgcctgcaatcccagctgctgaggaggctgaggcaggagaatggcgtgaacccgggaagcggagcttacagtgagcagagattgtgccactgtactccagcctgggcgacagcaagattctgtctcaaaaaaaaaaaaaaaagttctactttgcagtgtgaagtacataattttcactgaacatgcccaacagctgtccttatcttttcgaggattttgcttgaagctgaaggttaaggtcttacttagataaagataaaaggtcttggagatgagtaagtcttccaggccactttcttttctgctgcttgcctataaaactagtttctcatatcagagtgttgtttttttttttttttgagatggagtctcacagtgtcacctaggctggagtgcagtggcacggtctcggcttactgcaacctccgcctcctgggttcaagtgtttctcttgcctcatttctcttgcctcagcctcccaagtagctggaattacaggcacctgccgtcacgcccagctaattttttgtatttttagtagagatgaggtttcaccattttgctcgggctagtctcgaatacctgacctcaagtgatctgctgcctcagtctcccaaagtgcaggaattacaggtgtgagtcacaacgccggttctaattttttttttttttttttttttttttgagatgagtctcgctcagtcgcccaggctagagtgcagtggcgcggcttactgcaagctccgcctcccgggttcatgccattctcctgcctctgcctcccaagtagctgggactacaggcacccgccactacgcccggctaatttttttgtatttttagtagagacggggtttcaccatattagccaggatggtctcaatctcttgacctcgtgatccgcctgtctcggcctcccagagtgctgggattacaggcgtgagccgccgtgcccggccaatttttgtatttttatatagagactgagttttcgccgtgttggctagggctatcttgaactggcgtcactcaagtgatttgcctgcctcggcctctcaaagtgttgggattacaggcataagccaccatacctgacctgcagttatttcaaagtaaaaaggttttactaaacagttaacatgtttggatgttagtatttaatgtccatgtgagagatggtctttttaaaaaaaaatcttaactggaaaaatacagttctgggagaagtaaacattgaactgtatactaagtttaaaaaaaataatccaaggcttcgctctgggaatacatggggaaggattgcttctgcctccacccagatatgggaggatctctcaaccatgcttcccttgcccccctgctgcctgagagcatgctggaaagagggtttgataattcccacttgaagtcatgttgaatgtttttctatggtggcagattttaaagcatttctgttggttcatccaagagcagttaatgtttttcttttttttttcctaaggactggctctcactatgttgtccaggccggtcttgaacttctgggctcaacgaatcttcctgcctcggtctcccgagtagctggtactacaggcattcacaactgtacccaatttaatcctcttcatacattgcatttgtagtattgtagttcacaaaacatttccccatagtgccacctttaatccttgctgtctgcagcctgaggcaggtggtattttcatcctcatttttcacccaccaccagaaaggtaagtgatttgctgtaggtcccaaagctgccaggttggagagcccaggggcaaattccaggcttctgactctaggactgtgggcactccacaacactagtgagcctggagtcccgggtctccagaaacatttgaggaacaacttgtatttgccaacttttttttatgagatggagtctcactctgtcgcctaggctagagtgcagtggtgtgctgtcggctcactgcagcctccgcctcctgggttcaagcgattctcccgcctcagcttcctgagtagctgggattacaggcgcccgcccccacacccggctaatttttgcatttttagtggagatagggttttgccatgttggccaggctgatcttgaactcctgacctcgtgatctgcctgccctggcctcccaaagtgctgggattacaggtgtgagccaccatgcccggctgtatttgccaactttttattttgtcaaggaaaatatctttaaattagtgatcattcaccatttccgtttttcataattagcaagattgtctttatcaccaaaactataggaataaaataaaggacagtcctttaagttgaaaatatttactaaaatctttatttctggctgggcgcggtggttcacgcctataatcccagcactttgggaggccgaggctggcggatcacttgaggtcaggagttggagaccatcctggccaacatggtgaaatcccgtctgtactaaaaatacaaaaattagccaggaatggtggtctgtggctgtaatcccagttactcagtagagtgaggcagaagaattgcttgaacccacgaggcggaagttgcagttgagctgagatcacgccactgcactccagcctgggtgacagagcaagactctgtctcaaagagaaaaaaaaaaaaagctctttgatataataatactgttgcagtctgaactatgaaccattgcactggacttcacatttttaaatatttcagaatggcattgatagcaagattttagactggcattgcctcgctcggttgcttgctttttttttttttttgagacggagttttgctcttgttgcccaggctggagtgcaatggcgcgatctcggctcactgcaacctccatctcgcgggttcaagcgattctcctgcctcagcctcccgaggagctgggattacaggcatgcaccaccacaccgggctaattttgtatttttagtagagatggagtttctccaagttggtcaggccggtctggaactcccaacctcaggtgatccacccgcctcagcctcccaaagtggtgggattacaggtgggagccactgtgcccggccggttgctttctaagaataattttcaatgtgcccttgatggcgtgactctgtcaaagttcaaggagtcaccaagactcctagctcaagtgtatcatttcagctcacagcccaggatgggccagctccagaggtcaggaaaccaggaggtgggttgagtctctgaatttcagagcctaatttggtctctctcaagtgaatatccacttcaggaccattccctagagttgctgggaaggctgtaagacttatgaaataccccgaagacaggtggggccatacctgtgagggtgttgccactgtacctgtccattccacaaacatctgttcatccactcatgctgaactaacttgggcatgtttcttttccaacaagtgccatgaacctcatagtgtaattagtgagaggtcagaaagatggccattgcaccacaaacataatgttttgtggttgaagcttctgtaactgcatgttgtgggtgggctggattcaggaacaaaagaaaaatgaatccctgtgtgttaaaccatcccaaaccaccaagaagtcatgtttaaaatcccaatacttcatttaccacttgatcctgccttgggtttgttttcagagaagctgcatgttgctggtgcccaggattgaatcataaaaattgtaagaataggctttgctggtgccaggtttgaataaatgtggttgcaagaacagcattgttcatcgtttcgcagctttcgtttaaagttagattagtaggggcagcggagtgttgcgtgtgggtgggtgctgtaggcttattgccagcagtgtgcctcactaaatatcctcttgaaagggaagtttctgctcaccctgaagactgctggatcagttagtgagacaaattccaagaagctggcttggatgtcaaattggtcttgggctcatagagaggaatggatttgttgccctgaaaaggagcgataactctagtttttaaacatttgttttagttcagataattactgcccttattcattgtgtccacctgagtcagaaagcattgctgctgttgcctggtctaagggaggaggacccaggcatgtaacggactgcatgctggccagttgtggtggtcagagcaagctggaggccagcgaggcccttcaggggtcttttcaagggtctgccttggggagcagaggaagatgaagtgaggcagtcgttatagcaagggcacacccacgtttctcattttgaacagtgaagaaagcagatggaaagccacatgtagggcatttgctgaagacaggtgtgttgggggcgtgtgtgtgtcctctgaggcattttgggtggggcgatattttgaccgaatgataccttgttcttcagtgcttcaatggttgatggggtggctttttttcgagatggagtctctctctgtcatccagactgcagtgcagtggcgcgatctcggcttactgcaggctccgcctcttgggttcacgccattctcctgcctcagcctccctgagtagctgggactacaggcacctgccaccacgcctggctaatttttttgcattttttttgagatggagtctcgctctgtcgcccgggctggagtgcagtggcgcgatctcggctcactgtaacctccgcctcccgggttcaagcaattctcctgcctcagcctcctgagtagctgggattacagacgcctgccaccacgcccagctaatttttgtatttttggtagaggtggggtttcaccatgtgggtaggctggtctcgaacccctgacctcgtgatccacccgcctcagcctcccaaagtgctgggatcacaggcgtgagccactgctcccgtccaatttttttgtatttttagtagagaggggtttcaacgtgttagccaggatgctatcgatctcctgacctcatgatccaccagcctcagcctcccaaagtgctgggattacaggtgtgtgccactgtgcctgatagtggggtgattttctacttctaactctctaatgtgtcacatggctttttttaatagattgtctgtatcaactgggggtgaactttagtcttttaacaattttcagactatgaagtttggatgtaaacacctctaatgtgggaagttagttttttttaaagtatctgtatggagttatggatatatataaatttaatgtgttgaatctgttttattttagtaacatcttttgaaaatgttcaaacatagaaaaaagggtgatacaattttagtgaacacttaggccgggggcagtggctcactgcctgtaatcccagcactttgggaggccgaggtgggcagatcatttgaggtcaggagtttgagaccagcctggccaacatgttgaaacccccgtctctactaaaaatacaaaagttagcctggcatggtggtaggtgcctgtaatcccagctatccgggaagctgaggcaggagaatcacttgaacctgggaggcggaggttgcagtgagccgagatcgcgccactccgctccagcctgggcaacacagtgagagtccgtttcaaaaataataataataaaaaatttaagctgggcgcagtggctcaacgcctttgtaattccagcactttgggaggccgaggcaggcagatcacttgaggtcaggagttcgagaccagcctgacaaatgtgatgaaaccccgtctctactaaaaatacaaaaaaaaattagccaggtgtggtggtgcatgtctgtaatcccagctacttgggaggctgaggcaggacagtctcttgaacctgggaggcagaggttgcagtgaaccgagatcgtgctgttgcactccagcctgggcaacaagagttaaactgcacttcaaaatataataataataaaataaaaaatttaatgaacacctacctgtatgcacagcctaggttttgctgtgggcatttaactgcttgtgtttcacatatttgtccatccacttataattcttttcacttttcactttattgattgatcagagacagggttacacttttgttgcccaggctggagtgcagtggtacagtcatagctcagtgccatctcaaactcctgtgcttaagcagtcctcgcgtctcagcctcccaaagtgttggggttataggcgtgaaccactatgcctggccaaatatatgtatatatatttttgtatatatttttttaaattttatttttgttttttattttatttttatattttgagacagagtcttgctctgtcgcccaggctggagtgcaatggcgcgatctcagctcactgcagcctcagcctccctggttccaacgattcttctgccttagcctcctgggtagctgggattacaggtgcactccactacgcccagctaatttttgtatttttagtagagacagggtttcaccatgttggtcaggctggtctcgaactcctgacctcaggtgatccacccacctttggcctcccaaagtgttggtattacaggtgtgagccactgcgcctggccactttattttgatgatgcatttcaaactaagtagcaggaagttgcaagtcttccctctacatattattaactagaatttaatatttatttacagttcttttttggggtggcgggggtcagggtctcacacactttttttgcccaggctggagtgcagtagcacagtcttggcttactgcagcctccatctcctgggctcaagtgatcctcctccctcagcctcctgagtagctgaaattaacggcaggtgccaccatacctggctaattttttttttctttttttttaagaaggagtttcgctcttgttgcccaggctggagtgcaatggtgtgatctcggctcactgcaacctccgcctcctgggttcaagcgattctcctgcctcagcctcccgagtagctgggactacaggcacgtgccaccaatgcccagctaattttgtatttttaatagagacggggttttgccgtgttggttaggctggtctcaaactcccgacctcaggtgatccacctgcctcagcctcccaaagtgctgggattccaggcatgagccaccgcgccctgcctacctggctaatttaaaaaaaaatttttttggagaccaggtctgattatgttgcccaagttggcctcgaactactgtgctcaagtgccttggcctcccaaagtgctgtgataacaggcgtgagccactgctcctgcctcactttatttttatgatgcatttccaactaaataacagaaagttctaatcttccctctacatactaacaagaatttagtatttatttgcagctaggtttttatttttttctttaaaaattttttttgtagattcactcaggctggtcttgaactcctgacaagtgctgctcccaacgtggtgagccaccatgcccagcctcttttttctttttaaataatgcacagatctttagtataccagtcagtgaattctggccactgcatatacccaactcttgtcaggagggagaatgtaaccttcatctcagaaagcttgggagggccccttcccatgtgatccctaccaccgttccccagaggctgtcccatcactgattagtttcgcttattctagaactttatgtaggtggaagcatgattctttttgaatttgttccaaatgtagccagtgggacacctcacaagtcagctccgatgtcctcaggacaagactgctatagtcaccagtgctttgttgctttctggcgctccggtaggatccaggctcacttggtatatcccctgctgcagattacggtccacttctcccgggagctgctttcagtaggtttttgttgttgttatatttttgtttatttatttatttcgagacattctcttgctgtgtcaggtaggctggagttcagtggtgcaatctcggctcatggcagtctcctccccagttcaaggaggtcaaggagttcaagaccagcctggtgaacatagtgaaaccctgtccctactaaaaatacaaaaattcgccgggtgtggcgacacacacctgtagtcccagctactagggaggctgagacaggagaattgcctgaaactggcaggcagagattacagtgagccgagatcacaccactgcattccagcctgggcgacagagcaagactctctcaaaaaaacaaaaagtgttggctttgcatcgtggctcacacctgtaatcccagcactttgggagactgaactgggaggatcacttgagcccaggagtttgagaccagcccacgcaacatggcagcaacccatctctacaaataattaagaacaaaaaatctattatggaatttttaaaacatgcacaaaagaattacagtatccatcacccagcttcaacagctgtcagtgttctacagtcttgtttcatccttctctactttcctttttttttttttttggagacggagtcttgctctgtcgcccaggctggagtgcagtggcacgatctcggctcactcactgcaagctctgcctcccgggatcatgccattctcctgcctcagcctccctatagctgggactacaggcacccaccaccatgcctggctaattttttgtatttttagtagagacgaggtttcaccgtgttagccaggatggtctcgatctcctgacttcgtgatccgcccgccttggcctcccaaagtgctgggattacaggcgtgagccaccacgcccggcctcatccttctctactttctgctccctggtatatttcagagcaaataccaggtatataattttagccataaatttgtcttaaatatgtgtggaacagttaaagttggttctttccagcacaaccacagtattattcccctaactgaagtaactataattccttcataaggattcacttcatgaacaagattcccagtgtcgttgcgactatccagggaaaccatagccaagggaacaggcttggcagaatcagtggcgaaagaaggccctgtggagcttgactctggctcggtgaagagacatgggtgatggaggagaggatgccctttgcacacacatcactcacgcctggccctcattgcagcctgggaaggcagatttttttcaacagtaggatctagtaccaattgttaggtctatgggatatgtgctgcatgcttcaagtaggttgacttgtttcattttcctagtcctgccgagagtagaggggcctcttccgtgttgctaatgcaagaaggaagctagtggctgggcaagtggggtttcaggtccaagtctgtgcagaagctttccttgggcgatcgatcgagtggcttgccccatggtgtgagtctcaggcatgttgagccactgagcccagggactggctttctgcccttttcatcccatgccccctcacactccttccctcctgcatccctaccctgacatgaagcctttgacctcaccatgtcctgttgctgggctttgcaggggcatcatttgactcctaggggttttttgttttgttttgttttaaatgagacagagttttgctcttgtcacccaggctggagtgcaatggtgtgatctcgactcaccgtaacctccgcctcccaggttcaagcaattctcaggcctcagcctcctgaatagctaggattacaagcatgtgctaccacacccgactcattttttgtatatttaatagagacagggtttcaccatgttggccaggctgatcttgaactcgcgacctcaggtgatgcctctgcctcggcctccctaaagtgttgggattacaggcgtgagccaccgcgcctggtgacccctaggttttatttatttatttattgagacggagtctcgctctgtcacccagggtggagtgcagtggcgcgatctcagctcactgcaacctctgcctcccgggttcaagtgattcttctgcctcagcctcctgagtagctgagacaacaggcatgtgccaccacacccggctaattttttgtatttttagtaaagatggggtttcacagtgttagccaggatggtctcgatttcttgacctcgtgatctgcctgccttggcctcccaaagtgctgggattacaggcatgagccaccgcacctggccggttttatttatttattcatttattttttttgaggtggagactctatttgccacgcaggagtgcagtggcgcaatctcagctcactgcaacctctgcctcccggtttcacgctgttctgcctcagcctccctagtagctgggatgacaggtgcacgccaccacatctgtctaatttttgtatttttaggagagatgtggtttctccatgttagcccagctagtctctaactcctgacctcaagtgatccacccaccttggcctcccaaagtgctgggattacaggcgtgagccacctcgctcaagcacccttaggttttaaagtttaaccttggggtgtttaaattttgcagttagatttgctaggtagtcctgggtattttgggaagttcttgttttggcagcatgtcagactttatccttgatgcttgggcctttcaggtttgagcctgctctgctggctcggaactagtttagtcggaaggggctggcagttgcctgtagggggtagattcatctggtgtgtattatgctgatggggttttttggttgtttactcatttggaagatttcagtatggaccagactgtttgtgtagagtgggaattgagtaggttggagtcggcatgattctgagaccgaaatagtaattatggcttcgtttgtcctgaaggattctgtcgtgcacttcagttgtctcagcctcttcagagttgaacgtgatgtggttgtcatcgtccacctgatatttcaaatgttcacttttcgggaggttctttctttttcattttacagaagccttttgggaccctttgtcatatgtctttcttccttccacctcttcattaccatcagaggtcagagctccttccctctcttttccttccccaagcaccaagattttgatgtgaacatctttttttttttgttttttttttttgagatgaagtcttgctctgtcacccatgctggagtgcagtggtgtgatctctgctcactgcagcctccgcctcctgggctcaagcgatacttgtgcctcagcctcccgagtagccgggactacaggtgcccaccacgcccggctaatttttgtatttttagtagagatggggttttacagcgttggccaggctggtcttgaactcctgacctcaagtgatccacccatctcagcctcccgaagtggcaggattacaggcgtgagccactgtgcctagcatgatgtgaacatttctacctgtagtgttttttggagagctgttaatattttcatacttgtaaaaatgggcatatttatgtaaaggaagataaaagaagtaaaataccatctgagtggcttgtgggcctgaagtcagttctggcttctagaaaccatctgttttcatttttagggtgttacgtagttaatgccttggcttagcagtggttacttggaaataaagatgtgtcctgctgtgttgacaggcccttcatgaggcagcacacatgtcattcttgctactgtgtacctagctgctgaaatgaatcctataaattatatgaaactaaaaagattttctgatcttatagagttgaagtattgataacaccaaggaactctatcacaatttgaaaagataagcaaaagtttgatttccagacactacagaagaagtaaaaatggtaagtttgtttttgatcacagatactgtttcttcactcatgtacagagatgtttgtagccttttccaaagcatttgcttccattaccatttttattagcccttttggattataaagcaatattatctattctgtattccattctgatagtgtaggaacgaagtcagtgccccattactcccactgcccagagacaacagcttttcagtttgcttgtccctccttggttcttcagttgtgctcctgcaggctttgcttttacacacgagcgatatagcatcattctgaattgtgcagcttaaaagatgaacgttgggctgcttgctctctttacatcatttttaacttaattctcacatccctagcgtccaatgcgaatttttgtgaatgatgaccgccatgtgatggcaaagcattcttccgtttatccaacacaagaggagctggaggcagtccagaacatggtgtcccacacggagcgggcgctcaaagctgtgtccgactggatagacgagcaggaaaagggtagcagcgagcaggcagagtccgataacatggatgtgcccccagaggacgacagtaaagaaggggctgggtaagtgaggttttccgttgtccttttcttttttgtagggtagccagggtagaggttggcacctgttttctaagaaactccagcctctctggggacctctgggttgtggtcagactgaattcctcactgagctgggtgttggtctgtccctcagggaacagaagacggagcacatgaccagaaccctgcggggagtgatgcgggtgggcctggtggcaaagggcctcctactcaagggggacttggatctggagctggtgctgctgtgtaaggagaagcccacaaccgccctcctggacaaggtggccgacaacctggccatccagcttgctgtaagtgtggccaccactgccgggtaggtgggtgggggggtggtaggcatgctgattgaggatgtggggcccaggaagaagtgtcctgctaggctgtgctccaagaagcacatgccacacttgccctggcacttgctgtgcgtgtgccttctcagtaggtgacaaccaggacaccaccaagccacagagattctgtggaacctgactgcaggggtcataaggaccccgtgcctattgtgtgccaggctgcaccagcccgaggtcattgggcataaacttcacgtctaggctccattggatggatggctagatagatagcagagttgttatctcttccattggatccaaagctgaatgtaaagaattttttttttcttttgggacggagtctcgctctgttgcccaggcctagagtgcagtggctcgatctcagctcactgcaacctctgcctctgaggtagacaattttcctacctcagactcccaagtagctaggattacaggcatgcaccactacacccagctaatttttatatttttagtatagacagggtttcactatgttggtcaggctgtcctcttaactcctgacctcaggtgattcatccacctcagcctcccaaagtgctgggatcacaggcatgagccacctcgcccagctgaaaatcttttctatatgtttattttttattttataaatagagatgggttcttgctatattgccctggctggattcaaactcttgccctcaagcagtcctcctgtccccagcctcccacagtgctgggattagaagtgtgagccaccacaaacaatttttttttttttttttttttttgagatggagtcttactctgttgcccaggctggagtgcagtggtgcagtctcggctcactgcaacctctgcctcctgagttcaagcgattctcctgccttagcctcccgagtagctggtattacaggcacatgccactacgtccagctaatttttgtatttttagtagagatggggtttcgccacgttggccagagtggtcttgaactcatgacctcaaatgacccgcccacctcggcctcccaaagtgctgggattacaagcatgagccaccacgcctggccgtttttatttttttaagatgaggaaggtttcgctctgtagcccaggctggagtgtggttgcgcaattatggttcactgcaacctccacttccagggctcaggtgatcctcccattgcagccccctgagtagctaggactacagtcatgtactaccaccccgagctaaaagatcttttaaaaaaaaaaaaaacatttatttgtttcattgtgaaagtattgcgtaaataatggcttctgtttattgagtgtttgctaaagtcaggccctcagccagatgtgctcttcatgtgtgttatttcatcctcctctaagtgggacagatgatgtgacagagctgcagggcagctgaggagtggatcccaagacccacggctgggctgtttggaggcatcagaacctctgccagctgttgcctcctcaggacacagtccccctgaatttatttataggataagcaaaaaagaagtgtacaatcatctataaatctttgacagagtcttgctctgtcatccaggctggagtgcagtggcctgatctggggtcactgcaacctctgcctccctggctcaagtgtttctcccacctcagcttcccaagtagctgggactacaggtgtgtgctaccacacccagctattttttgtattgtctgtgtgtatgtgtgtgtgtagatacgaggttttcccatgttgcctaggcagttcttgaactcttgatgacaggcctgagccaccacagcctttgaatctttgaatcttattccttggaaagaaaaacctgatttactttcacaatgcagatttgtgttctttcacatgggactgacgattttgggttcaggacaaagatcaggattaaaatacggagctaatgtaaatgcattagatacttctgcggagctattgtagatgaagctgtgaaatttttctagtgacaattttctttttttttctcctgaaggtacatcagcatagaggtaattccttttcttttttgaaacagtcttgctctgtcacccaggctggagtgctgtggtgcgatgttggcttactgcagcctccgcctcctgggttcaagtgaatctcctgcttcagcctcctgagtagctgggattatgggtgcccgctgccatgtccagctaatttttgcatttttagtagagaccatgttggccaggctggtctcgaactcctgacctcaggtattatgcccgtctctgcctcccaatagttctgggattacaggcgtgagccactgtgtccggcccatagtggtaattttttggcagaggggggtgtgggggcgggacagagtttcgctgttgttgcccaggctggagtgcagtggggcgatctcagctcactgcaacccccgcctcccgggttcaagcgattctcctgcctcagcctcctgagtagctgggattggaggcatgccccaccacgcccagctactttcatgtttttagtagagatgggttttctccatgttggtcaggctggtctcgaactcccgacctcaggtggtctgcccgtcttggcctcccaaagtgctgggattacaggcgtgaaccactgcgcccgtccatagtagtaattcttaaattaactttattcttgtctctatctagcaaggatattaagtgaagtaaattgtcataaatgtttctacagtaaaaacatttgtgagaaaccattccttttttttttttttttttttttggaggtggagtctcgctgtgtcgcccaggctggagtgcagtggcgccatcttggttcactgcaagctccgcctcctgggttcacaccattctcctgcctcagcctcccgagtagctgggactacaggcacctgccaccacgcccagctaattttttgtatttttcgtagcatctctggtctttaccaggtgaagtttcatctgtgttagccaagatggtctcgatctcctgacctttttttttttttttttttttttttttaagggaggcaaggtctcttgctctgttgcccaggcttgggtacagtggtgcaatcacagctcactgcagcctcaagcaatcctcccacctcagcctcctgagtatctgggaccgcaagcatgtgccaccatgtctggctaatttttaaaattttttgtacatacgaggtttcattatgttgtcctggctggttttgagctcctggccttaagctatttgcttgcctcagcctcccaaagtgctgggattacaggcatgtgccattgagcctggccaataattattccttaaagatgaaaataataggtatttttaaaatcattttcagtggttccttaagaggggtgaatcactctcctcccctgataacatttggtagtgtctgttgacaatgcggtgttggggtgctgtggtgctgtcagcacctgataggtgaagaccagagatgaacaccctatcatgtgcagagtagtccccccaaccaagaattatccagcccagaaggtcagttgtactgaggttgagaaatcctgtttcagatttttcaatgtatttattctcctcccaacatatttacttaacttccttcagcttgaattttcttctttctttgttttgttttttttttttttttttttttgagactgtgtcttgctctgtcccccaggctggagtgcagtggcacagtctcagctcactgtagcctccgcctccccgcctcagcctcccaagtagctgggattacagggcctgccaccgtgccgggctattttttatatttttagtaaagacaggatttcacaatattggtcaggctggtctcgaactcctgacctcaagtgacccacccacctcggcctctcaaagtgctgggattacaggtgcgagccactaccctcagccaaaagcttgaattttctttgtcaagtcataagaaggtggtatcaagaatgaaaatagtcgtgagtgtccttgtagatgtgcatttgcagcaagtacatacgtttagatgcaccataggatactgcacactgactgtttcactgcacacagggtttattctacactggctgctcatcccagcatggaagtagcagtggctggatgcccactctgcagtgtccaccgctttccccgcagcgtctgtttgaggcttccagcagccttgtggtgtagttcgtgtcattaagtccattatacagattagagtctgtatgagagtgatttatccaaagttgatcaactactaaagggcaaaaggggggtctcctcctcctggctcctggatccgaaactctttgccattggtttttttttggagactgagtctcactcttgtcacccaggctggaatgtagtggcgcgatctcagctcactgcagcatctgcctccctggtttaagcgagtctcctccttcagtcttctgagtatctgggactacacgcttccactgcacccagctaatttttgtatttttagtagggatggggtttcaccatgttggccaggttgatcttgaactcctgacctgacctcagctgatctgcccactcagcctcccaaagtgctgggattacaggcgtgagccacctcacctggcctaacattgcttttttgtttgtttgtttttttttttttttttttttttttttggtttttttttttttgagacagagtctcgctctgttgcccaggctggagtgcagtggcatgatcttgcctcactgcaagctctgccttccgggttcacgccattctcctgcctcagcctcctgagtagctgggactacaggcacccgccaccacgcccagctagtttttttgtatttttagtagagatgggatttcaccctgttagccaggatggtctcgatctcctgaccttgtgatccgcccacctcagcctcctaaagtgctgggattacaggcgtgagccactgcacctggcctaacattgcttttttgtttgtttgttgttttgtttttgtttttgtttttgagatagagtctcgctctgtcgcccaggctggagtgcagtggtgtgatctcagctcactgcaagctccgcctcccgtgttcacgccattctcctgcctcagcctcccgagtagctgggactacaggtgcctgctaccacgcccggctagttttttgtatttttagtagagatggtgtttcaccgggttatccaggatggtctcgatctcctgacctcgtgatccactcacctcggactcccaaagtgctgggattgcaggcatgagccacggctcccagccctaccattgcatttttaagcaccgtttggaaatcgcttctttcactagttatccctctttcaagtacccaaaacgtggccaaagacctggccaattagagagaccctgacatcccaggtgaaatcacttccgggtcatcatactcaagacgttggcctttctgttgcaggaataggtggagccagataaaattgttgattgctttgaggagaaagtgttttgaaagttgcattttattttttaggctgtaacagaagacaagtacgaaatactgcaatctgtcgacgatgctgcgattgtgataaaaaacacaaaagagcctccattgtccctgaccatccacctgacatcccctgttgtcagagaagaaatggagaaagtattagctggaggtagggaggccgagacacgccggcaggactttgaaaatgtggtgttccctcactattcaaatgtgctattcagttttagactgctttggtatacggtgtagattgaccacctttactctgagatcacatctcccgttggctttgagtacttgggagtttgacaaaacagtcgcactaaaagtgagtagcacttttcataggggactgcaccattttcctttatcttcatccttgaacgttctcaaacatgaatgtggaagttgcttttctatggagccattctctggctgtggagaagtgtccctggtgattccatggttttaaagatgagacaaccagatggtttctgcatgagcaccacgttggagtttaccaacagcctgtgctgcagctgagctgagggcctcttcgtttgtcctctgtcatggctcttttatcatttaaagtgacagaagcacaaagagctgatacagagttttggataaagttttaaactgttgtccaatttttcaaaccacatcattggacctcacgctaataatgtgctcgcagtccatggcccgccgctcgcatgcctgtcttcaggccttatccaaacccctggtgtgcagatggcagagaagataaacgctctgcttggccgcagcataggctggcatagcgcccttgttgctgtttacctttggttctcatagctgattccgactaccaaagcccttctagttgatcaacgtagggacgctggacctttgaccaacaggactctctctgtcaagggctggggctagggcagtcccgcctggtgggcggagttggtcccctttgctgcagatgccttgggatggctgttgtgtgatgcagagagggagttcatttcctctccctcggcctttttaaattttttcctattgaacattttagcatagctaatttattgggagaacatggggaggaggcaagggaagaggattagaagataggctccacctatctctcccctccctcatgagattattccttttagaataactccccacttttgtttttatgtttgttttattttttctttttctttcttttttctttttctttttatttttggagggggcctccaatttttacaatttcctcacagggcagagttgaatgtgctctagtttctccttccctggtccagggtggagatgaattcagcttctgggaaactcagctgccctttagaaagctgccacatcccctttccacctgacagaaaccccttggtcaaactgtgccttgtcttcttattccatccatgaatagaaacgctatcagtcaacgaccccccggacgttctggacaggcagaaatgccttgctgccttggcgtccctccgacacgccaagtggttccaggtttgcattttgttcttctatttgtcttttggtagagaattcctaagttttaacttggctaactgtcaccataaagattccttaacattgacgatagccgtgccgagcttagcacctgcagctgcgcaggtcctaaaggagtgcacctcaacaaattcgaccccaaaagaggctgagactgagttggtgggctgctgctgctgctgctgctttgtgttaagagtaacactctcttgtacacgtagtgacattgcggctggccacagccttggtggtcgccagtgttgactgtttacccttggcaaagcagcaacctgacacttgtgtcgttcatgttgacttgtgccctgggcggtgcctcagactgaagagcctgtgttttgttcccctaggccagagccaacgggctgaagtcttgtgtcattgtgatccgggtcttgagggacctgtgcactcgcgtgcccacctggggtcccctccgaggctgggtaaggcatgttgctgtggctactgggggtggtgtgtgcagagtcttttggatatcccaggaacacttgatggtcacggggcaggagtggcctcttgacgcgtggctggtgtgtactctccagagctgcctgtggagctgctcctgcttgccacacctggggttggggttggggcagtgtgggtcggggccctctgcagggtcgcacagctcaatcccaggagtgggggctgaccaggaggtgggaatgatccctctgggaaggtttgtagatagtctcacgcaggaccagtttttggcagttgcacccttttttttttcagcttgcagttgaggtggtttttatatttgtaaataaatggttagattttaagtaagaagtactacatcataaccttagcttggtctctgagctcacacagcctgctaggatgtcatgtctggtccttgaaggcccctgtcctagatgccctggctcaggcttagccctgaggctttgactttacccgactggttggctatgagtcccacgtgtgccccgacccactcatgcagtgacagctccccagtggcggccggccccatcctgtaggctcttggctcactgtccctcttccctttcagcctctcgagctcctgtgtgagaaatccattggcacggccaacagaccgatgggtgctggcgaggccctgcggagagtgctggagtgcctggcgtcgggcatcgtgatgccaggttggggccttgtgctttgcaggttgcagggaaaggacagggttccaggccgcctcctggcgggtacactgactgggttaggacagcagcagccccgtgtccaccccctagagctgaagcatgtgactaccctctggcaccatcatatccagccctgaccgggtccgcagccgtcattcagagggcggatccggggcagtggtgacccactcccacgtgactttcttgctctgagacacttgtgaattatttctgtcaagggctggacgccgagtgggtcaccgagctaggcatgttttccagagctgggtgtggatggggcgcggggggtaacacacctagttccctcagccagcacacctcttcagagatgctaaaagataatcctctgcatatcttccttgtttcctgccttcagatggttctggcatttatgacccttgtgaaaaagaagccactgatgctattgggcatctagacagacagcaacgggaagatatcacacagagtgcgcaggtatagtcatcgccattgccaacgtgcgccctgacccagtctgtaatcactggcttccagttccattactgggtattcccagggtagcccctggactcgtaggctcaggtcggggactgaaggcaaaaggattgtgtctgatacagggcgccccaatctgggctgcttctttcccctggtgccatgcgtggttttcatctgccccctcccttggcttgctcgagtgccgttttcagacactgtgagtggtgctgggagatgtgtttgctgtgcggactgctccggggggaccttcccctgcaggcccccacatggctccgtgtggcaaccagtccccaggttggggtctcctgtattcctttggaaggggggtggtcacaggctggccttcccccacagcaaggctgggcttgagcagtcaggctctcccctggctggtgggggaccccttgctgtcgtaagggagaccattagcagcccttcagctctgcccctcctcagaaggcagtagtgagcacacactccatggccgggagcacagggcagctgagtcagagcctcttccccttctccagcacgcactgcggctcgctgccttcggccagctccataaagtcctaggcatggaccctctgccttccaagatgcccaagaaaccaaagaatgaaaacccagtggactacaccggtaagcctgcggcggttgcctgatggctggggctccaggaagagtcaccatctgcatctcccagccatgccctggtctctccttgcagttcagatcccaccaagcaccacctatgccattacgcccatgaaacgcccaatggaggaggacggggaggagaagtcgcccagcaaaaagaagaagaagattcagaagaaaggtacaggccgggcgcggtggctcacgcctgtaatcccagcactttgggaggccgaggcgggagaatcgcttgagctcaggagttttgagaccatcagcctgggcaacatggcgaaaccccgtctctacaaaaaatacaaaaattagctgggtgtggtggcgcacctgtagtgccagctacttgggaggctgagatgggaggatggcttgagcctgggaggcggaggttgcagtgagcaactgtactccagcctgggcaacagagcgagaccttgcttaaaatcagtgttgaaaaattttagaagctaaataggtaaaaaagcaggaaggtgcagacctccactagtgctgctgctttatccatctggtcctgtgaaggctcaccctgaagctatgggatggctgcttttgtttcatttttctcacttgtgatttctgagtccttttaacaatgatgaggcatgattggggatgtggaagatgagtaggatggtggtgctacagctggaggccacaggagaggtgcaagctgggctcagtttgtgtggctgccccacccactgtgttacgccacagaggcagccctgggggttaggattggcagagctctcgtggagacctgccatcgtgctgatccagagccaccttgctattctctctgtagaggagaaggcagagcccccccaggctatgaatgccctgatgcggttgaaccagctgaagccagggctgcagtacaagctggtgtcccagactgggcccgtccatgcccccatctttaccatgtctgtggaggttgatggcaattcattcgaggcctctgggccctccaaaaagacggccaagctgcacgtggccgttaaggtgagtgtggccagcatcactgtcttctaatagcagaaccatggtctttgttttgggccccttctgagccattgtctctcagggagggcatgtagattctaaaaatacacatggttagatggcgagtatttgccaagtcacgtggcaagaacgccttcccactgtggctggcaggcagaggggtccccaaacatgattggggcattagggcctcctgggagcaggagctgaaaggaaacagccctcctccagatggcttcccgggtgggtgcctgtaggccatgaggaggccctgcatgcagccctgcttcactgggaccttgggggtcttgccacctctgcaggtgttacaggacatgggcttgccgacgggtgctgaaggcagggactcgagcaagggggaggactcggctgaggagaccgaggcgaagccagcagtggtggcccctgccccagtggtagaagctgtctccacccctagtgcggcctttccctcagatgccactgccgaggtgagcacatggtgggcgctgggagtgactgcctggacagagcaggcagccatgtgtcctgtcagtgaggtggttactggtccttgttaatttgccccaaaaagtggacctttcaggccagaagtccgcacaggaagctgggtgctgccctccgagccgtgtcggggagggccttgtggatgttgtcccagcatcctataggctacactggggtggccttgggttgataacgtgctgttcagaggggaggcacaggaagggggcacattgctggaaggccctcactagagtcagtggagactctggcaagggctggcagtgtatgaagagcagaggccctgcctcagtcctgccactcctcccatgtgactggaatgcccatagctgagtttgtcggtcttcttttctgttttccctgagaacgtaaaacagcaggggccgatcctgacaaagcacggcaagaacccagtcatggagctgaacgagaagaggcgtgggctcaagtacgagctcatctccgagaccgggggcagccacgacaagcgcttcgtcatggaggtgcgcagcctgaagctgcctgctggggcagtcccatggggaggcctggggtccccctgcccctggagggaggcactgagtcatctccatctgcactttccaggtcgaagtggatggacagaagttccaaggtgctggttccaacaaaaaggtggcgaaggcctacgctgctcttgctgccctagaaaagcttttccctgacacccctctcgcccttgatgccaacaaaaagaagagagccccagtacccgtcagagggggaccgaaatttgctgctaaggtgagcagtggcccttgaacctccttgcccaggcatgggttcttctgcaatgtgagcacgaagggaatgtcacttccctgtgttctcttctagccacataaccctggcttcggcatgggaggccccatgcacaacgaagtgcccccaccccccaaccttcgagggcggggaagaggcgggagcatccggggacgagggcgcgggcgaggatttggtggcgccaaccatggaggctacatgaatgccggtaagggccctcatactgcactgtccccgccttccccacgtgcatgctctgggaacaaatgtgtggggctcctggggtgggccggagacactgctggaccccggtaaccctgtctttccctttccaggtgctgggtatggaagctatgggtacggaggcaactcggcgacagcaggctacagtaagtgtgcgtttctgtctgtctgacctgggaagcagctgcagtgtagcgtctgggcctgagttagcaaagggtggccagagcagcctcgaggaggctgtagaaggggcacacacctttttgcggtgattaggtcagacggccctcgacccccaccccttcccggccccacagtgggattgattgtgttaatacacgaactcgtgtaactgcaaagttccttaaaagttagaattttaaatttctctgctttaagccatgcgaagcaccaatcttgtgaatacgcttttccggccagtgcacagctcttgtcttgagaaggagccttcattggggggttacaggagcagagaaatctaaaacatgaatttcaaatgtggcgctctgtgccctttttcaaaagaattctaatttcttctctctgctctgtctcccccttttgtaggtgactttttcacagactgctacggctatcatgattttgggtcttcctagagcgtctaaaagtattgcacacaaaatcaactttttactccaatttcctccaactccaaaacccaaagtgtccgtgctgtgtccctgtgcttcactgggtttctcaaccgtggcttttcaccgcagcttgtctgaaactcttagcctgcagaatttaagacaatggcagtttttatcgtgatttgcctttgaacttggtcctattgaagttcacaataagtggaaaacaattttttcagagaatgtatttttgtgcagaattgcacagaattctagagacagcgttgttcggcatcaaggcaaaagcccacctttgctttttatggaaagcattactttatttaaagagacagacaatgacgcattttaatctacctttgtcttaatttacagcaggttttgtatgaatttttaaccttttaacaaactcccaaatctggttgatgcctttgacagtgatgaaaacgatttcaccacatctgaatccagagaaaccggctttttttcttattgcgagcatgttaaaacgttgggaacatgtggggaattgtatattgcgctgaattaacttctcccgcctcttgtaatgctctggtgggttcttgtttgggaatgcgatattttgtggctggtttagctagagagtgaactctcaaaggtatcaaaactgtgcttccattattagtgcaagaaacagacaggctttaaggggtagatgacgtgaaattttgcaagtcttaattacagctgcagatgcatgggattctggatttttttgttgctttttagtttaatgggactttaaaagtaattgaggagaaagaaccgtgatgttccctgtttctccagtaaaggactggcttttgcttgggcagaggtggtgctgctgggtgtgcagctgccacagactccaaaggcgtagaagtttgtgccaacacacggagtcattctggctctctgctgaggcccctgttttctggcaggtgccctccttggaaactggttttggctctgatcagcggttctttttgcagcaaagcctgcatctgtgttgacttgcaagattttgcgtttattcaggcaaaaactggtcaaaatggttactacatgatttgttcccagaggtttgaaacattcagtgaaactttttaaaactttgattgcatgatgtattttttttttagaaagttattgtttgagaataatgtctttttataccaggaaaatagttatcctgaatgacgttgaaaactccccctcccctttatttttttttaatcaatacatgtgaaagtaacaagccctcggcccttgcgtcttcattcattcccggcttcaggcggggcgaggtggtgtgctcagtgcaggacactggggaagctggggctgtggggctgtggggtgtgggtcctggtgggggggttctgaagatcccatcctcccagtctcctcgctgagctgccgcatgttcgctttctggcattgtgggacacatcctcccccttggtgtcttggctttgtgatggcgggcgagggaggaggcctgcctgaagaacacaaactgaaggttgcagatagttctgtccacgttgtcatgcaggcagcccaccacaccagcgtggggtacacatctccagtgggtggaggcacgtgaggactcccagttaccctacccaggaggcggtgggcccttagtgtcctcaatctgggaaggaaggacaggcagcgtgggagcctccccttccctcccacccaccctgggcctggaggtctgggcagcctgactgggcaaaggtggctgcattcacaagccgacccgctctgagagcccaggaactcagctgcgcctggtgagcgcttgggcgttggccagcttggctggagagccaccaccatgacccagcctcccacctcacccaccctctgagccttcccacacccactgtggaggctccctgtgtggggctcccttgcaaggcttggggtgcagcattccctcagccagtgccgtcccctttgttccactcgagcctctggcggggccgtgtattgacaaacctagtgaccagaagtggggtctcactgctacattttcagcttgcggctgagaatgtagtggctgcactgcacactttcagccctgctgctcagccccacctgcacccagcagctgtgctggggacaaggaaggggcctcgggagtcattagggctgtaggtctaggcctcacccggctttcctgccccagccgtggccactgccctctgccagccaggctggggcttggtcacatcctgagtcacatgcttgcatgagtatcgcaagggaggtgcctgcatcattgactgagtctcgatttgtcttccaagaaccaaaccagctcagaccagttggtcttctcaggatgatgacggtccggggcctctttaaatagcatcttttaggggcctccaggcctgtgcctgtggagcctgttcccagcacagcagggaggaggggggtggctgctgcttctctggggctttgcttttcctgtcaccattggggatctctgggtagccgtcagctagctgtgaatgtcgtcccgcgctcggagtccatctcattgtaatgttgacatccgctgcaaaagctgctggcgcgtgctgcttggcaaagccccattgttgtcatcagctgctgggtgagtggagctgaaggctgggccagcccaaacggctgtgctaaggaccggagccactgctcctctccctccttgtcctactgcctctgacccgggcttgtgggtcagccttcaggacccatggctgccgcctgcccttccctcccttccccctgccctttcccgtcctccgcctgacccactgcctccctgtttaggtcagttctacagcaacggagggcattctgggaatgccagtggcggtggcggcgggggcggtggtggctcctccggctatggctcctactaccaaggtgacaactacaactcaccggtgcccccaaaacacgctgggaagaagcagccgcacgggggccagcagaagccctcctacggctcgggctaccagtcccaccagggccagcagcagtcctacaaccagagcccctacagcaactatggccctccacagggcaagcagaaaggctataaccatggacaaggcagctactcctactcgaactcctacaactctcccgggggcgggggcggatccgactacaactacgagagcaaattcagtgagttggcttccagagcccctcggccgggccagggtccaggccccagcagtgcagcccacggagtggcagaagctcggcactgcccagacctctggctgagggccttaggaggaggacaagtggtgctggctgcgggcgggtgctaggaagatggggcgtgggacctcatggtgccgtctccgccactctctctggtgtgttctccgaaggcagggtagctgaggcctctgtcccgaggccctggctgtgggtgaggctgcaaggtgacttcctgggacttgctctagagagttttgcatccagcccctgcaagagcctgacctctccgccaccgcctttccgcttcctcatgcgcagacccagcaggcccgggctgcaccagtgacccagtggggctgagtaggtgtgtccttgggacccagcagctgtcagcagcaggccagggacttgacagaggctgtgctggtgggtcagaagggggtgctgtgtgtctggtgctgctggctgaggagaggcggctgctggggtctcaagcacttcctcagctgctgctgggaagtttgggctgcaggaacagatgggaaggcaccccagagcagggctttggagcttggtgaccagcccagcccagggccaggtgaccctgcagggctccagctggcccctggtacttacctgatgggctgatgtgcgacattgaagcaggcagggagaagagttagaggcccagggtctgggccaggggccggccgcgtctgaggcgcaccacaaggcccccgggccgcccaaggtgtgtctttcctggggccccttaaccatcctgtcttctctcccccagactacagtggtagtggaggccgaagcggcgggaacagctacggctcaggcggggcatcctacaacccagggtcacacgggggctacggcggaggttctgggggcggctcctcataccaaggcaaacaaggtgggcctggagcccctggtggcacagcatggggggcctggcagctgctgtgaagcgggatatggacctggtgggagcagacagcagcgtgggcagggctgcagtggcaggtgggccctgtgagaacacgcactcggatgcactggcagctgctaaggctttcgggagcagccggagagccagcagtgtccccacgcttaacccctggtacctgtgtgaaatgtgggtgacaccaaggccaaacagctgttcccccggttctggccagtagctcagccttgggctcaggtagcttctcccagaaacgagggtcacagtggtcccacctctcagagtcttggtgccagcctgatccagtgatgtgtggtaggcaggcagagccgcacaggagcccataagtcttgcccacctgcatcctggccgaggcttgggtgtgggctgcctaacctgagccccgctggctgggcccctcggctctaatccaccactctctctcctaggaggctactcacagtcgaactacaactccccggggtccggccagaactacagtggccctcccagctcctaccagtcctcacaaggcggctatggcagaaacgcagaccacagcatgaactaccagtacagataagcccccgcggggcggagatttctaccttctgcacttactccccatcagaagatcgagttttatgcatcacagttaacatgtcagctggccctccaggcccccgcccccatcccgtccacgttgctgtgtcgtgaggtgcagcgggtcaccctgtggcccgtcctgtgacccatatttagccgtgtttgggactccgtgtcttcaatggtttgttagttgccattacaactttgtctgggtagagtttttgagtttttgcagttcagtatccctctgtctattcacacttcgtgttagtggtaactcagtttgtctttaaatagttacagaagggatacgtcatttgttaatgcttttgtgaagtgagttaaacgagctttctgtattttaatgctttagtgtttcagttttataagtgaagattttattttaaaaaccagtgggaaagagtggggggtttctttttatgtctgggtcattcaggcagtacatctgaattaagctgaatgtagacaaataaagaaaaacaaaactgcgcccgtcttaggcctgggtgtctgacccaccagcagtgcaatgggcaggtttccccactctattcctgctcttgggaaagcagcgtgggccatcaggatggtccctggtccttagagagggtccagttcaggcttctagacattttactcatgctcagcgaaggctggttcctggtcccctgggctgtgtagacccggtgtcccaccaggctccaggctcccaccatctacagaggggcttacagcgcccattctggtcttggggaacccatcacaaaataggctttttctgctccccgattctggtgtagttctaagtacacagtgatgtcctctgtaggggcgtgcctgtggtggaacataacgcagttacaaaagaaagggcaggtgaggcctgggtaaccccagccatggaccgtcagtggctggagggagcttcgtgtctgtgctggagctgcagcctgctcgccatctggaggctcagtggagtggggagttggggttctcataccagcagatttccctagagcgtgattctcccatctgaggcaatcttgcctcccaggggaaattttgcaatgtttggaggatgttgtcacagctagtagcgggtgctctgggatctggtggatagatgccaaggatgctgtcaagcatactgtactgcccagaacagtggcccatagcagggacctgccctatcaaaatatcaggtgtatggaggtggagtcccaacgctagagcagcccttctcagctccaccctgcccggggagggaggaggagctctggtttcagagcagtgccgggattgcctttccccaggatctgtgtcggccatccaggaagaactgtactggccaagcctgggaccacacgtctgcagagatcctgctctgctggcctgagccccaggccttggcctcctgtgcttgggtaaccatggccactgggaaaagcaaggaccgtgtttgactttcttggagaggtgaaagaggtgaaagaacaagttgtgtgctagaaaacttttgaggaattcttatttgtgttagagcagaggaggtcccagataccaagtggcgcctcccaggaaaggctgggagaagaggtggcctggagtaccccgagatcccagcagcgcacacagtggagggatgaggatggatgggtcctaacccctgattttgatgggatgtgttcatgtcctatctcctctcctggacacattaaggggttgggacaagaagagactcctgtgagatcagcagacctcgtgtttaaggagagaatgcctgcctgcaacactcatggagagggacacttcctggccccacctgctaaatacctccaaactctgggcaggcgcctgcattctcaacacaggacttcccttaacagtttccggatcagtgaccaccaccacgttcaggtttctgaatgcagacccaccacgagggatggattccacccgcccgccctgctgcagatacatgcggcacagcaggcacgtgcctggagagaacagctcctgagcacagcacccttggagccctcaccccgctcacgatcctcaccagtgctgatgatgccgtcatgctgctggcctgagacagtatcccagctacaacaggacgacaccgggttcaggaatatgtggctatcaccttgagcactgacagtggccttccaggctagttgccttccaaacgcaggtagccgacctgcaggagggcctacaaacgggcccagcaagagctgggcaacagctggcttgtgaaatgagacaccttgaccaatatgctttgggtggacggtctcctacatgttcagtggaggccaccaggagcatccatgagcggggaaggggtccacacccttacatggcaagttgatacgatggggtgcttggtggatgggccatggaggtccgtgagctggaactgggcacacgccatcccagagggctcaggatgccccaggaaggaaagaagggcaacagactacacgattggacgtgtgtggttgactgggatgaagttggagggaggggcagggccttgcaggggattggtactgatcccagggaggaagtgttggggcttcatgaactaggatgaaaggaggcccctgagccatgacaaggggcacatccaggatttccgccaccctgaatttagtagagctagtaggccctggtcgtcactctgggcagggatgccgtcagccttgagggtcgccacccacctgtgtgttgccctctgtcctggcagggaaacatacaccccttgtctcaccaccaaccttgcttgtgtagtcagcagggctggccctgccccaaggactcactgcatgtacccggacccctaggcctggcctttgcagcatagttgggagcttctggattccatctgcacctgtgagccccatgctggctgtgcactgcgcgggcctgagactgctggatacaatgttgggcaacaactcagccagcctgatggcagcctcagaggcttactctaacccatcccagaataaatggagacttcatgtgttcattgtttcattcactcaacatgcgttcgttcattttttaagagagacaggatattgctctgtcatccaagctgaagtgcagtggtatcatcgtagctcactgcagtcttgaacccgagagctcaagcgatcctcccgtcacagcctctggagtagctgggaccacagggctgtgcctccatgactgactaattttcttgtagaggtgggtcgccaagcctagtcttgaactcctggccttaagcaactcagcttccctatagtagctgggatgacaggcagcgccactgtgccctgctgtcgtgtttattattgcacagtgattacatgtcaagtctggtgctggttgctgggaacgaaatggtgaacctgctcccaacccacatgtagcttccaggcacaaagagggctgtgtcacagtgggacaggaagtgcctgtcaaggctttcccctcaggtgagaggatgggtgagttggacccaagagtgttaggaagggaaggggaggccaggcagagggaatagcttgagcaaaaattcagctgggggatgaggatgggcttcaagaagctgaagtcaggtgggtagagcattttgatgcaaaacaaaggaatgctgggaaatgaggctggaggtcagtgggatcttgagggcccccaagtggagtgccaggcacaggagttcttgccttctttctaaggacagtggggagccatggatggattctgacctgggaagacttcaggcccattcaggctcccaagagtatatatttgtttatttattttacttatttagagatggagtttcgctcctgttgcctaggctggagtgcaatggcacgatctctgctaaccacaacctccgtctcccgggttcaagcgagtctcctgcctcagcctcctcagtagctggaattacaggcatgtgccaccaagcctggctaattttgtatttttggtagagacaagttttctccatgttaggctggtctcgaactcccggcctcaggtgatccatctgcctcggcctcccagtgctgggatgacaggtgtgagccaccgcacctggctgtttattttttaagatggagtcttgctctgtcgccaggctggagtgcagtggagcaatctcggcgcactgcaacctccgcttcccaggttcaagcaattctcctgcctcagcctcccgagaagcggtaactacaggtgtgtgacaccatgcccagctaacttttgtttgagacagagtcttgccctatcacccaggctagagtgcagtggcatgatctccgcttactgcaacctccgctttctgggttcaagtgattgtcctgactcaacctccctagtagctgggattacaggtatgcaccaccatgtccggctttttttttttttgagacggagtctcactgtcgcccagactggagtgcagtggcatgataccgctcactgcaagctccgtctcccgggttcacgccattctcctgcctcagccttccgattagctgggactacaggtgcctgtcaccacgtccggctaattgtatttttagtagagacggggtttcacgtgttagccaggatggtctcgatctcctgacctcatgatccgcctgcctcggcctcccaaagtgctgggattgcaggagtgagccaccgcgcccagccaattttttgtatttttagtatttagtatttttagtatttagtatttagtatttttgtattttagttccaccttgctggccaggctggtctcaaactcttgacctcgtgatccactcgtcttggcctcccaaagtgctggtattacaggcgtgagccacacggcgcctggcctacagtttttttgtttgttttgttttgtttttgagatagtctctcgctctgttgcccaggctggagtgcactggagtgatctcggcccactgcaacctccgcatcccgggttcaagttactctcctgcctcatcctcccgagtagctgagattacaggtgcccagcattatgcctggctaatttttggatttttagtagagatggggtttcaccatgttggccaggctggtcttgaactcttgaccttgtgattcgcctgcctcagcctcccaaattgttgggattgcaggcgtgagccaccgctcccagctgaaactattttttagacagggtctcggtctggtatgcagtggtgccatcatggctcactcatcctcctgagtatctaggactacaggcctcactgcctggctaatgtttgtttttcttcataggggcagggtctcaggttgatgtccaattcttggcctcaagccatcccctcttcagcctcacgaactgttggaattaaccattgtgagccaccgcgcctcagtacagttcttttggttgctgagctgagtaggtgtatgggagaggtgagaatgggggccctggagacgacaagaggcttgacttttggaacatcggagctgaggtttacagtgatttttgcagctgagtccactggtcttgataagggaagagtttctagactcaagagggttaaaaacggtatgtcaaagaaaaggggcccgtccttctcattctcagggagaccagcattctctccacggagtagccaagaagtccatgaactcccaggtcttgggccagtgcttttgtcttctcaaaagatctggcgcctaaggtcttcttgcttggcaacagggcagtaggtgggtggcaatgtcacagagggacggtccccacacgtccgatgaataaactggagaaatcctccaggctatcgagacgaccacccgaactcagggctccaaggaccattatttcagcaaaacccctaactctcctctcctgaatgttctgtattcctcagtcagtgctcagaagtccgtatcctggacccaggacctcagcacccgctccctaaggccaaccatatagtcccctgtttgggggctcccctgagcagtcgcgggcgatcccagagaaggcaagtttcgggatctgacagccccagtcacgaccctgggtgctgcgcaagcctccatgtgaagagcgcggaaaccgccccaggcctagctgctgcaaaccaccgcttccaaacttcccgccggtctctaggctccgggtgcccaccgccccttccttccttcctttgcgcaatcaacaagctccaactccagatgggatttcgcaggccctgccctgtgtataaactctcttcgtcctggggttgtcaacaaaatttttttttggagacggagtctcgctgtcgcccaggctggagtgcagtggcgcgatctccgctcactcactgcaacctctgattccctggttcaaacaattctcccgccttagcctcctgagtagctgggattacaggcaagcgccaccacgcccggcaacaaactcttctaattggccggactcgcaggccccgcccccacagagtgtgccactgcgtggagcgcgccgctcctcatagggcgcttgcgcaggctccgctccctgagcggccgctttcctggtctccaggcaacgcgtacggcgctgtccactgtgctgaagccgcacaccaagcgccgcctctagctgcaggctcacggcgcccccagctctcctaagtgggcggtgccaacaccctaaagcagggaccactaagcctcctttgcgccctatccccagtttatctcttggtaataggtagagcccacttccctccacgttggctgagaaagccctaccgtcccatccagctcagaggaaagcccaaggcttcccgcgatttcatgccgtcacctccacaccctcatccgctcacctccagccacactgacctccgcgctcacaacagacaatccagacacattcccacctccaggcctttgctcttaactgttcacgaggcctggagtgctctctccgattccgcatgactcctccatcctcctttcaggctcaaatcccaccgtctcagtgagcccagccctgactatcctgtcctactgaacacattgacctctctctatatgtatgtatgtatataattttatttttagttttttcgagacaggatcttgctctgttgcccaggctggagtgcagtggtgcgatcatagctcactgcagcttccacctcccgggctcaagctatcctcctgcctcagcctcccgagtagctgggactacaggtgtgcagcactgcgcccgtataatttttgtatttttagtacagcagaggttttcgccgtgttgcccaggctggtctccaactcctgggctcaagcgatctacctgcctcagcctcccaaggtgctggaattacaggcgtgagccactgcatccggactagaatatatttgtttaagtgggtggattaagcctcttttgataattgttgaagctgggtcattggttacaaggtgataactatgcaattctctgtccgtttgtctatgcttgaaaagtgtgtaatgaagaatgtcaggtggcacagtgatctccaggaggggcagagaaccagcatcaggggctacacagctagtggtggtaccccaacgccaaccccacacatagcccaatctcacaatgactaagtacagagactgtagttgatgctacaaggattactgtggctggagaccagatgtgcaaccacctataaacttcctgagtgtagcttcagttttgacataaactgttcttattttcatgaatctctgtgacatggatgtagctgcctccaactcctgtccctagtgttttcgagcccaagggcctgtttctccttatcattggcttttttctttttctttttctttttttttttttttttgagacggagtttcactcttcttgcccaggctggagtgcaatggcacgatctcggatcaccacaacctccatctcccaggttcaaccaattctccttcctcagcctccttagtatctgggattataggtatatgccaccatgcccggctaattttgtatttttagtagagatggggtttctccatgttggccaggctggtctcaaactcccgacctcaggtgatccgcccgcctcagcctcccaaagtgctgggattacaagtgtgagccactgtgcccggccaccaccactggcttttgatccaaattgtgaatggcagaacctgagccttgtgcagcctggctgcagggcaggctgggaaagtaactgtcaattataacttctatggaaaggcaggcttagccttaaaaaatatgacattctctcaatgcaggggtgtatgagcggggtcaggtgttaggtggccaagaaaagaaggggctatactagcttcagaacagcaaatccaggcaacccttaatccaatcagccattcatccaatcatggtgattgcattctaaaatgcagaggattccctccaacatcccagaagctttggataaccaagaattgcaggcaggtcagagctccaagataaggtcacccagaaaagaaagagactcactttggataagataatgaaatgctgtttttggaacctaaaccactgagaggcaacattggctgcacacagaaattccttgaggcttaaaacaaaaaacaaaagaaaattgatgactgagtctcatccccatagatttttttttttaagagatgatcggccaggtgcagtggatcacacctgtaaccccagcactttgggagactgaggcaggtggatcacctgaggtcaggagttcgagaccaacctggccaacattgcaaaaccctgtctctactaaaaatacaaaaaattagctgggcatggtggtgggcgcctgtaatcccagctactttaggaggctgaggcaggagaatttcttgaacccgggaggtggaggttgcagtgagccgagatcgcaccattgcaccctagcctgggcgactctaatttctggcctcaagcaatcctcctacttcatcgtcccaaagtacataagctactcaccatagattttagtttaagttgtctgggcatagagatagttaaaaactccacaggtaattctatgtgcagccaagagtgaaaaacagtggttctgaaacgagtgggcatcagaataacacagaaagcttggcaagaagcagacttaaacacatattggccaggcgctgtggcaatcctcctgcttcagtctcccaagtaactggaattatgggtaattttttaactttttttttttttttttttttgccatgttgcccaggctggtctctaactcgtgggctcatatgatccacccaccttggcctcccaaagtgctggaattacaggcgtgagccactgcgcctggtaaacattttgaaaaatagaaatattagctgggcacggtggctcacacctgtatcctagcactttgggaggcctagatgggtggatcgcttgaggtcaggagtttgagaccagcctggccatcatggtgaaaccttatctctactaaaaacaaaaattagccggacgcggtggctcacacctgtaatcccagcactttgggaggccaaggtgggaggatcacctgaggtcaggagttcgagaccagactggccaatatggagaaaccctgtcgctactaaaaatacaaaaaaattagccaggcgtggtggcgtatgcctgtaatcccagctactcaggaggctgaggcaggagaatcacttgaacccaggaggtggaggttgtagtgagccaagattgcactattgcactctccagcctgggcaacaagagcaaaactccgtctcaaaaaaaaaaaaaacaaaaaacggccgagtgcggtggctcacgcctgtaatcccagcactttgggaggccaaggcaggtggatcaccaggtcaggagatcaagaccatcctggctaacatggtgaacaccggtctctactaaaaatacaaaaaattagctgggcgtggtggcaggcgcctgtagtcccagctactcaggaggctgaggcaggaaaatggcgtggacctggcaggcagagctttcagtgagcagagattgtgccactgcactccagcctgggaagcagagcaagactccatctcaaaaataaaaaaaaaattagccgggtgtggcagcaggcacctgtaatcccggttgcttgggaggctgacgtaggagaatcgcttgaacctgagaggcggaggttgcagtgagctgagactgtgccactacactccagcctgggcaacagagtgagattctgtctcaaaaaaaaaaaagaagaaaagaaaagaaagaaaagaaatagaaaagaaaggatgagtgttgtagacaaaggcaggtgcaaaggccctgaggttggcttgctggtgggcaggggtgttttccaggcgggttttccgggtgtggccttactaaggatgccccaccatctgggcaaccggcatccttagcctttcttacaggatagggggcttgaggctcccttagacaccctcttggccagagtagctcagtttaagacaattgaaaggacatcttctgggacaatagcgctctctgctggccaggacagatatcagatccagttgtaatgataacaattactatataatattgtatattattattatctttttttttagggtttcggtctcactctgttgcccagcctggtgtacagtagcccaatcatagctcactgcagcctccaactcttcagctcaagtgatcctcctgcctcagcttcttgagtagctgagactacaggggcgtgccaccacaccatgttaatgtttttgttttgattttgtttttgtttttgttttttagatgaagtctcgctttgtcgcccaggctggagtgcagtggcgcaatcgtggctcgacctccgcctcccgggttcaagcgattctcctgcctcagcctcccgaatagctgggactacaggcacgcacccccacgcccggctaatttttgtatttttttagtagagacggggtttcaccatactggccaggctggtcttgaactcctgacatcgtgatccgcccgccttggcctcccaaagtgctgggattacaggcgtgagccaccgtgcctggctcacaacctgttaattttttaatttttaaaacttttttttctttttgacacagagttttgctcctgttacccaggctggggtgcaatggcacgatctcggctcactgcaaactccgcctcccaggttcaagcaattatcctgcctcagccttcggagtagctgggattacaggcatgcaccaccatgcctggctaattttgtatttttagtagagacggggtttctccacattggtcaggctggtctcgaactcccaacatcaggtcatccgcccgcctcagcctctcaaagcgctgggattacaggcgtgagccaccgcacccagccacaccagcttaattttttttttttttttttttttgagatggagtctcgctctgtcacccaggctggagtgcagtggcacgatctcggctcactgcaagctctgcctcccaggttcacgccattctcctgcctcggcctccggagtagctgggactacaggtgcctgccactgcgcccggctaattttttgtatttttagtagagacggggtttcactgtgttagccaggatggtctccatcccatgacctcgtgatcctccctcctcggcctcccaaagtgctgggattacaggcgtgagccaccacccccggccctttattcaatctttacaaagtctttatgccgagatgctgtaattcgccacattttatccaagagaaaattatggctaagagagtctctgattgtagctcgaaagtgctagggatgggattcgttcccagttcaattctgattcttcgctttagcgtgttgtgggtaggagttaaatgggcccccagccaggaccaggggttcaaatccgttgccatggtcccccgacgctttcccgggctccagaacggatcgcgtggtcacgtgacagcggccaacatggcgccgcccactgtgtggtacggcccacgtggttccgacagtcaagatggcgggagcagctacccaggcttccctggagtcggccccacggatcatgcggctggtggccgaatgcagccgctccagggcccgggcaggcgagctgtggctgccgcatgggacagtggccactcctgtgttcatgccagtgggcacgcaggccaccatgaagggcatcacgaccgaacagctggacgctctgggttgccgcatctgcctgggcaatacctaccatctgggtctaaggccggtgggtgggctctgcccgcgcggggaggcggcgaggcggcgaggcgtggggagccatggagcgtcctccaggcccggacactcctcccaaagtcaatcgaccagctgtattgagcgcccccaatgaccaggccttgtactgggcgtgaaagagcagcagggactaaagctggccagatctgtctcccaagaagggcccccagggacgcggtcacccctaacctgacactttcttccatcaacccagggacccgagctgatccagaaagccaacggtctccacggcttcatgaattggcctcataatctgctaacggtgagctgaggagagagccgacgttctagggcccttctctggagtgaagggtccccatctccaccccctgacagctttgcggtggggtttcccttaggacagcggcggtttccagatggtgtcgctggtgtctctgtccgaggtgacggaggagggcgtccgcttccgctccccctacgacggcaatgagaccctgctgagcccggagaaatccgtgcagatccagaatgcgctgggtgagaggaccctggggagccgcctccttaccctgtctgtcagggggtgaagtttacacggggcctgttttttagctgttgtgtggctttgagcaggtcactcctcgctgagcttcagttgaaccaactcaaagcgggggtaaatagtagcaggtctttggtagaattgttgacaagtacatatgagatgatgtcagtaaatctccatcccagccatgtagtagcttaagtattattattgcagtttttctctcattagcaaattaagactggacgtggaagctcatgcctgtaatcccagcaatttgggaaactgaggcgggaagatcacttgaggccgggagttggagaccagcttgggcaatacagggagaccctgtctctaccaaaataaaaaataaaaaataaaaaaaacaaattaattggacaaatatctgttgaaataatggtggcaacaagaggattggggaggctttaggcttctcccatatcctcaatatccttctttttttttttttttttttttttttttgagacagaattttgctcttgttgcccaggctggagtgcaattttgcgatctgagctcactgcaacctctgcctcccgggttcaagtgattctcctgactcagcctcccgagtagctgggattacaggtgtgcgccaccacacctggctaattttgtatttttagtagagacagggtttctccatgttggttaggctactctcaaactcctgagctcaggtgatccgcctgcctcggcctcccagagtgctgggattccaggcgtgagccaccacacctggctttttttttttttttttttttttgagacagagtcgcccaggctggagtgcaatggtgtgatatccagtcactgcaacctccacctcctgggttcaagtgattctcctgcctcagcctgctgagtagctgggattacaactgcttgccaccatgcccagctaatttttgtattttttgtagagacgggtttcactatgttggcaaggctggtctcaaactccggacctcaggtgatccacctgcttcggcctcgcagagtgctgggattataggtgtgagccaccacgcctggcccaatatccccatttcttgataaagaaccatggcaacacagggtcaaaacccctcttcccctcatcattctaatagattgatgctgtagggaggaagaaatattttttcttcttagattcatggctgaagcccctataacaaaaacccttataagaaaagaagccacgtgctgggtgcggtggccacgcctgtaatcccagcactttgggaggcggaggcgcgatcatgactcactgcaacagctgcctcctggttcaagcaattcgcctgccttagcctcccaagtagctgggattacaggtgcccgctaccacacccagctaatttttgtattttcagtagagatggggtttcaccatgttggccaggctggttacgaactcctgacctcaagtgatctgcccatcttggtcccccaaagtgctgggattacaggtatgagccactgtgcccggcctataagtttatttttttatgtttatttatttttatgtattattttgagacagagtctcactctgtcacccaggctagagtacagtggcacaatctcaggtcactgcaacctctgcctcctggcctcaagcaattctcctgcctcagcctcccaagtagctgggattacaggtgcatgccaccacgcccagctagttttttgtatttttagtagagacagggtttcgccatgttggccaggctggtcttgaactcctgacctcaagcgatctgcccgccttggcctcccaaagtgctgggattacaggtgtgagccaccatgcccggccaaatattttttgtagagattagagtctcactacattatctgggctggtcttgaactcctggctacaaacagtcctttgccttgaccattcaaagtgctcatgttacaagcatgagccactgtgccagcccccatgtgttttttgtttgtttgtttgttttttctggagatggagtcttgcttagtctcccaggctggagtgcggtggcgcgatctcggctcactgcaagctccgcctcctgggttcatgccattctcctgcctcagcctccggagtagctgggactacaggcacccgccattacgcccagctaatttttttgtacttttactagagacggggtttcatcgtgttagccaggatggtctcgatctcctgacctcgtgattcgcccatctcggccttccaaagtgctgggattacaggcgtgagccaccgcacccggcctctttttttttgaaaccgagtttcgctcttgttgcccaggctggagtgcaatggcgcaatctcggctcacagcaacctctgcctcctgggttcaagcgattctcctgcctcagcctcccgagtagctgggatgacaggcatgcgccaccatgcccggctaattttgtatttttggtagagacggggtttctccatgttggtcaggctggtcttgaactcccgacctcaggtgatccgcctgcctcagcctcccaaagtgctggcattacaggtgtgagccaccatgcccagctaaagttctagctttttaatgaatgtcgtaatttttttttttttttttgatgtggaatctcgctctgtcacctaggctggagtgcagtggctcgatcttggctcactgcaacctctgctgcccgggtttaagctattctcctgcctcagcctccccagcagctgggactacaggtgcctgccaccacgcctggtaatttttgtacttttagtagagacggggtttcaccttgttggtcaggctggtcttgaactcctgacttcaggtggtccacctgcctcagcctcccaaagggctgggattacaggcgtgagccaccgcacccagccccatatttattttttcgtcttttctttttttttttcttttttgagaaggagtctcactctttgaccaaggctggagtgcagtggcactgtgttggcttactgcaacctctgtcttctgggttcaagcacttctcctgctgcagcctcccgagtagctgggattacaggtgcccatcaccacacctggctagtttttatatttttagtagagacggggtttcaccatgttggccaggccggtctcgaactcctgacctaaggtgatccacccgtctcggcctcccaaagtgctgggactacaggcgtgagtcaccacgcctgcccctttttttcttttttgagacacaatctcgctctgtcacccgggctggagtactgtggtgcaatctcggctcactgcaacctttgcttcctgggttcaagcgattctcctgcctcagcctcccaagtagctgggacttcaggtgcatgccaccatgccgggctaatttttgtatttgttgtagagacagggtttcaccatattggccagggtggtcttgaactcccgatctcaagtgattgacctgctttggcctcccaaagtgctggggttacaggcgcaagccaccaggcctggcctgttcttttttttttttttttttttttttttttttgtggagacagagtctcgctctgtcactcaggctggagtgtagtggtgcgatctcggctcactgcaagcttcacctcccgggtgcacaccattctcctgcctcagttcccgagtagctgggactacaggtgaccgccaccacgcccggctaattttttgtatttttagcagagacagggtttcactgtgttcgccaggatggtgtcaatctcctgacctggtgatccacacgccttggcctcccaaagtgctgggattacaggcgtgagccactgcgcccggctgtggcctgttcttttttattttaaattgttttcatctatttattttcttaataatggagatggggtctctctgtgttgcccagggtggtctcgaactcctgggctctagtgatccttccgcctgggccttccaaagtgtttggattataggtcatcaagtttcattttatgccactaaaccactatgctgtgcaccgtggctcatgcctataatcttagcacttttgttttgtttttgagacggtgtctcgctctgtcgccttggctggagtacagtggtgcaatcttagctcaccgcaacctccgtcttccgggttcaagcgattctcctgcctcagcctcttgagtagctgggattacaggaatataccaccacgcccggctaatttttgtatttttagtagagacggggtttcaccaccttggccaggctggtctcgaactcctgacctcaaatgatccacctgggttggccttccaaagtgctgagatgacaagcgtgagccatcgcgcctgtttttttttttttaaccttttttttttttttttaacacagccttgctctgtcatccaggctggagtgcagtggcacaatcttggctcactgctacctctgtctcccagattcaagctattctcctgtctctgccttccaagcagctgggaatacaggcacgtgccatcatacctggctaatttttgtgtttttaggagagatggggtttcaccatgttggcgaggctggtcttgaactcctgacctcagatgacctgcctgcctcggcgtccccaagtgctgggattacaggcgtagtcactgcgcccagtcagcagagccctgctgatggacgtttggtttcccggtcttgctgtggcacgccacatagcaagggatccctttgtatattttaggattttattttgtgtaacaggataggattttaagctggggagaggcaggatcaaaggcacattctgtaaagctccttctggctgctgtataaacagaccgggaaagtcacgtgggagttagcaagacgggggatggggggatgctcttggggaagtccaacttgtccccatgtgacggcaggctttccccaagcattgcgggctttcccagtgatgttgcccccatctcaccatcaggctcggacatcatcatgcagctggacgacgtggttagcagtactgtgactgggccacgtgtggaggaggccatgtacaggtgtgtatatgctgtgtgcatgtgtgggatatgtggtgggaggggatcctggtccctgtagccttgtctcctaccccctcaccaggcccctggggcttgtgactggggccctgttgcaggtcaatccgctggctggaccggtgcattgcagcccatcagcggccggacaagcagaacctcttcgccattatccagggtgggctggacgcagatctccgggccacctgccttgaaggtagagccatgcgctggcaggcccagggcttggccatcgcggaggtccccacatgggcctggcgtatggcgggactggattgctaatgtgtagaagggcactgcgctagaaaaaatagccggagcaaaggctctcgggccacgtgcagtagaatgtattgagagaatggccatgattccagtagttaatgatcttctaggttttttgtttgtttgtttttgtttttttttttgagacggagtctcaggtgatccaccccccttggcctcccaaagtgctgggattatagtcatgagccaccgcgcccagcctatttatgtatttatttattttactttttttttttttggagggtggagtcttgcactgtcgcccaggctggagtgctgtggcgcgatctcggctcactgcaacctctgcctccctgcaacctccgcctcccgggttcaatctattctcctgcctcagcctcctgagtagctgggactacaggcacccgccaccaggcccggctaatttttgtatttttagtagagacagggtttcaccattttggccaggctggtttcaaactcctgaccttgtgatctgcctgcctcggcctcccaaagtgctgggattacaggcgtgagccaccgtacctggcctctttatttatttttgagacacggtcttactctgttgctcctcctggagtgcagtggctaggtcaaagctcactgcagcctcaaactcctgggatcaagcagtcctgcttcagctttccaaagtgcttggaatataggtgcacgccggtgtgtccagccatgcattaccttttacatgcaatgctttctggtgttttcttttctctttcatttaaaaacaacgacaacaacccgtgcgtcatcaaagtcatttctcaaccacctgcagtttgacaagcaccgccccatggggtgcttctcaaagtgctctgaggcttacctgccccagcacaaactactgaaagtcctggtaaaatgcagctccccttcccatgatccgaccagagttggagctagggaaggcctaggaatctgcatgtaaacaccctgtgtccagttggaggatgctcacattaccttcaaaacctggccccagacaacgcctgcattcctttttttttttttctttttttttttttttgagacggagtttcgctcttgttgcccaggctggagtgcagtggcgtgatctcaggtcactgcaacctccaccttccggtttcaagtgattctcctgcctcagcctcctgagtagctgagattacaggcatgcaccaccatgcctggctaatttttgtatttttagtagggacagggtttcaccatgttggctaggctggtcttgaactcctgacctcgtgatccacccccaccttggcctccagagtgctgggattacaggcttgagccactgcacctggccaacacctgcgttcttgatggcatggcctcttcgggttgaactgggcagctggggcacaagataagcctggacttggaggccagacccaggtttgaatccagcctttggcatatgtagccttggactagtggtttaagctctgcaagcctcaatttcctcttgtttcaggcaagttgaacaatagcacaattctgcagccccttctgtgtcatccaggtcctcagagcgaaagtctaaaatccagaacattggccgggtaccatagctcacacctgaatcccagcactttaggaggccaaggcaagaggattgcttgagaccagtctgggtgacatagtgagatcccatctctaaaaaaagagaattgggccaggcacgctggctcacgcctgtaatcccagtactttgtgaggccaaggcgggcagatcacgtggtcaggagttcgagaccagcctggccaacatggtaaaaccccgtttctactaaaaatacaaaaattaggccgggcgtggtggctcgcgcctgtaatcccagcactttgggaggctgaggcgggcaaatcattgaggtcgggagatcgagaccaacctggctaacacggtgaaaccccatctctactaaaaaatagaaaaaattagctgggcgtggtggcgggcgcctgtagtctcagctactcgggaggccgaggcaggagaatggcgtgaacctgggagacagagcttgcagtgagccgagattgtgccactgcactccagcctgggcaacaaagtgagactccatctcaaaaaaaaaaaaattagccaggcatggtggtgggcacctgtaatcttagctactcgggaggctgaggcaggagaatcatttgaacccgggaggtggaggttacagtgagctgagatcacaccactgcactccagcctgggcgacagagcaagaatctgtctcaaaaaaaaagaaaaaaagaaaattagcacgcaagcatgggagtgtgtgcctgtgatcctagatacttgggaggctgaggtgggaggatcgcttgagcccaggggttggtggctgcagtgagctatgatgacatcactgtactgcagtctgggtaacacagtgagaccctgtctcaaaaaaaaagaagaaaagaaaagagaaaaaacttagaatgccctgaaaaatttgcaactcatttcatggctaacttagatctctcattttttatcccagttgttacaagtattcacatatttttatttttatttattttttatttttttgagatggagttttgctcttgttgtccaggctggagtgcagtggcaccatctcggctcactgcaacctctgccttctggtttcaagcgattctcctgcttcagcctcccgagtagctgggattacaggcaccagccaccacgcctggccaatttttgtatttttagtagggatggggtttcaccatgttggccaggctggtctcgaactcctgacctcgtgatccacctgccttggcctcccaaagtgctgggattacaggcgtgagccatgtgcccagcctatttttattttttaaattttactttggccgggcgtggtggctcatgcctgtaatcctggcactttgggaggctgcagtgggcggattacctgaggtcaggagttcaagaccagcctgcccaacatggcggaaccctgtctctattaaaaatacaaaaaattagccgggcatggtggtgggcgactgtagtcccagctactcggggggctgaggcaggagaatcacttgaacccgggaggcgagggttgcagtgagccaagatggtgccattgcactccagcctggatgacaagagcaaaactccatctcaaaaaaaaaaaaaaaaaaattaagttctgggatacatgtgcagaacgtgcaagtttgttacacagctatgaatgtgccatggtggtttctgcacacatcagcccgtcatctaggttttaagccccgcatgcgttatgtatttgtcctaatgctctcactcccctttcctccaccaagtcttaacatattttgttgtacaaatattacagtgtttgatgacaggctattgggtgttttgttgttgttgttgtttcgttttgttttgtgagacggagtctcgctctgtcgcccaggctggagtgcagtcatctgatctcggctcactgcaacctccacctcccgggttcaagcgattcttctgcctcagcctcctgtgtagctgggactgcgggtgcccatcaccacacctggctaatttttgtattttttagtagagacaggatttaaccacgttggttagcctgctttcgaactcctgacctcgtaatctgcctgccttggcctcccaaagtgctgggattgaaggcatgagtcaccgcgcccggcccttttttttgagatggagtctcactttgtcacccaggctggagtgcagtggtgtgatcttggctcactacaacctctgcctcccaggttcaagcgattctcctgcctcagcctcctgtgtagctgggaccaaaggcgtgcaccaccacgcctggctacttttcatatttttagtagagacagggtttcaccatgttggccagattgttcttcaacaccagacttcaagtgatctgcttgcctcggcctcccacagtgctgggatgacaggcgtgagccactgcgcctaacatgacagctgttactcagcatgtgggatgtttactgttctcacatctggaaaactctgaattctgaaacacatctggttccaacagtttcagctaagggactgtgggctgtgcctcttctgagtactgaaggaaaaggtcttgcatacagcaggcactcaataaatgttagctgagatcagcagtagtcccagcccctagacagacagacaaactgatggaccctctcctctgtctccctctccgtctccctctccgtctctggctctgtctgtctgtctctgtctgtttctctgactctctccctgagcgactctggaagtctgggcagggtgtgttctgggattgaagaccaggcgcatttcctcttctgtggccctcaccttaccctgtaccctcagagatgaccaagcgagacgtgcctggcttcgccatcgggggcctgagcgggggtgagagcaagtcgcagttctggcggatggtggcgctgagcacctctcggctgccgaaggacaagccccgatatctgatgggggttgggtatgttgtggatagggaagccagagccctacctgtgggaagtggattcctggggaccccctaccctgcttggggaggtggcatttgggggaaacggacacaggtctgatctgaggagactaggaagacatggctgtcccttgggggccattctgagggaatatggcccagtctggggcagtgtgagggttgggaggggccctgggaagcccctgaggttctctgccccctcccgtcatggctgcaaccccagctatgccactgatctggtagtctgcgtggctcttggatgtgacatgttcgactgcgtcttccccacacggacagcggtgaggctctggcagaaggaggtcagggcgggagacgggtgggggactagggaggcaaggttaggggtggggggtggggagaatgaagccctgggtgacgcccctttccctgcccttcctctcccacagcgctttggctctgccctggtgcccactgggaacctgcagttgaggaagaaggtgtttgagaaggacttcggccccatagacccggagtgcacctgccccacgtgccaaaagtaggcaggatggcactgggagctggggcagggcatggaggggacagggcctggccgtgctgagctgtcccctgccgctctacaggcacagccgcgccttcctgcacgcactgctgcacagtgacaacacggccgcgctgcaccacctcacggtccacaacatcgcctaccaggtgagccagtgcccggggcaaggtgggcgggggtgtcctaggtgcgtatgccccacgctgacctcccctccccgcagctgcagctcatgagcgccgtccgcaccagcatcgtggagaagcgcttcccggacttcgtgcgggacttcatgggcgccatgtacggggatcccaccctctgtcccacctgggccactgacgctctggcctctgtgggaatcacactgggctgacctggcattgggagagggagggaggaaggaagggagggaggggctggaagatactgaaggattcctttttgaaaggttttttttattgtaacttacagagtgtgtctgtgtcttcttgaggaagtggcctgtctgggtccccctcccagtctgagcgtcattgcagtggaatatctccccttctcaccaatcataacacgtcactgtggcagcagcggatagctggaaaccacctgccagtgcccagcatgtagggcgtgcccctagagcgggagctgccacctgcttcctggggcccaggccccccagccaccttggagggaggtactgttggcctctccttttttacagctgaggaagcaggcccagggaagggagggaacttgcccaaggtcatcaccatcaaagaaatggtatcttggctttaaggcatacactcctagtctgacttttataaatatgaggcttaatctcctatttttttctttcttttttttttttttccgagactgagtctcgctctgtcacccaggctggagtgcagtggtaggatctcggatcactgccacctccgcctcccgggttcaaacgattctcctgcctcagcctcccgagtagctgagactacaggcgcgtgccagcacgcctggctaatttttgtatttttaatagagatggggtttcaccatgttggccaggctggtctcaaactcctgacctcaagtgatctgcctgcctcagcctcccaaagtgttgggattacaggcatgagccacagtgcccagcctcttttttttttttttttttttttttttgagactgtctccctttgtcatccaggctggagtgcattggttcaaacacggctcactgtagcctcgatctggagccgccacacccggtctactcttgcaacttgatgttgcatgtacagtcgtgttccattttacggaggaggacactgaggcacagaggaatgaagtttacatggtcactgtcactttcttagtccgttctggctgccatatataacaaaataccatcaactgggtggcttataaacagcagaaatttatttatcacagttctagaagctgggaaattcaagatcaaggtaccagcagattcagtgtctgttgagggcaaacttcctagatggcgatcttttctctaatctcacatggcgggaggggcaaggcagctctctggggtctcttttatgaaggcgcagtgagaagctcagcaggtttgtgaaaagaaaaaaaaatacataagggcacaaatcccattcacctaatcacctaatcgccttccaaaggctccacctccaattaccatcatgttggggattaggtttcatcatgtcaatcttggtgtggtgggtgatggggtagagggctggtctataaacattcagaccataataatcagtaaataaacaggcccaggatctaacccagatatgatcagttacagagctagtgatcttcaccagcctgggcaacacggtgaaactccttctttacaaaaaatacaggtggtgtgcatctgtgctcccagctactgaggaagctgaggtgggaggattgcttgagcccaggaggttgaggctgcaattgcaccactgcactccagcctgggcagcggagtgagactctgtctcaaaaacaaaaaccagtgctcttcaaaaatgaagtttttgaaatggaaaaagtaggccaggtgcagtggctcacacctgtaatcccagctactctggaggctgaggcaggagaatcacttgaacccaggacgtggaggtggcagtgagccgagatcgcaccactgcacgccaccctgagagacagcgagatttcgtctaaaaaaaaaaaaaaaaaggttggacgtggtggtggctcacacctgtaatcctagcactttgggaggccaaggagggcagatcatgaggtcaggagttcaagaccagcctggccaacatggtgaaaccccatctctactaaatatacaaaaattagctgggtgtggtggcacgtgcctgtaatcccagctactctggaggctgaggcaggaatatcgcttgaagccaggacttggaggttgcagtgagccaagatcgcactactgtactccagcctgggagacagagcaagcctccatctcaaaaaaagaaaagaaaagaaaaaaaaagtccaagcgcggtggctcacacctgcaatcccagcactttgggaggccaaggagggagggtcatctgggtcaggagttcgagaccagcctggccaacatggtgaaaccccatctctactaaaaatacaaaaattagccaggtatggtggcaggcgcctgtagtcccagctacttgaaaggctgaggcaggagaatcatttgaacccgggaggcggaggttgcagtgagctgagattgcatcactgcactccagcctgggctacagagcaagactctgtttcaaaaaaaaaaaaaagtgaaaaagtaatacatgtatgtaatccacaattcaaatcacatcaaaagtgcaactacttttatcaatttatgtatttttccagcaattttccgtgtgtacatatggttttcatgcatgtcagcatccttcacacacagttctgtaccttgcttgttttttcctcttagtatatctcaaattatttatacttcagtacatgaagagtttcctcaacgtttttgtttgtttgtttatttgtttttgagacggggttttgctcttgttgcccaggctggagtgcagcggtgcgatctcagctcaccgcaacttctgcgtcccgtgttcaagcgattctcctgcctcagcctctcgagtagctgggattacaggcacgcaccaccacgcctggctaattttttgtatttttagtagaaacgtggtttcactatgttagccaagctggtttcgaacctctaacctcaggtgatctgccctccttggcctcccaaagtgctgggattacaggcatgagccaccgcacctggcgctttttgcctatttctttgagacctggggttttgggtcacaaaacaggcaaatgccatgagccaccctcctcctctttctccatcttcttgtgctgcctcaggtcagagcacttacctgctcctgccttctcactgggtttccttgtctctggcctatttgtctccagaggggtcaaaacacttcaaatcctcctatttgtctctgtccactgtcaggagttccagttcccagaaccccaattttgcctacaaaatagcgtgtcttttcacggggagaggatttgttgagttttagtgggtactcaaaaagatctaaagccagttgggggggttcacacatgtaatcccagcacttttgggaggccggcctgtgagggtcgtttgggcgcaggagtttgagaccagcctggacaacacagcaagaccctgtctctataaaaaataaaataaaaataattagctgggcatagttgcgcacgtctgtggttccagctactcgggacgctgaggcgggaggatcgtttgagcccaggtgcttgttgaattgagctatgagtgcactactgcaccccagcctgggcaacagagtaaggacccagtttctaagaaaagaagattcattagctagacgcggtggctcacacctgtaattccaacactttgggaggccaagacgggcggatcacttgaggccaggcgttcgagaccagcctggccaatatggtgaaaccccgtctactaaaaatacaaaattagctgggcgtggtggctcacacttgtaatcccagctattcgggaggctgaggcaggagaattggttgaaccggggaggcggaggttgcagtgagccaagatcgcgctactgcactccagcctgggtgacagagtgagtaccccgcctcaaaaaaaagaaaagaaaaaagattcatgatctgctaaagttgaagaagtgggggaaaacattggagtgttagcggcgtcaagatcgggcgtgagcagaaagggcacagcatttgcaaaggcgtggaggagtgattttattgcgttctatccctaggaagcaatgacttggcctctaccatttgcagagcgcattgggaccctgctcccagagctggtttgcagtctgggaactgagatgcgctctgggacttgtagttttccccagtgccaggaaactcaaaaatcgagacatcggatcccaccacgaggtgtcgcccttgagcgagtacggtgggatctatcctatacttcagaaggctgttgcagacatccaacaatcacaaggaagaacgggagtttttctgattgacagatatggttctcaatgatagtcaagattcggatgttaaagcccgccctcttttgcctggttggctggagcaacgaagtgatatttatatgaaccaatgggaaattcttagggaacgaggtagtagctcaatccccaacaccattggtccacattgtctactggcacgtctgcctgccaataagatggtggaacttcgccaatgggcagagccaacgtgcctttttcggaaacacccccttcctctcttgacaacttgctttctgccgctattggctgttgcacaacagtgacggttcttttgtccaataagtcagcaagacggtccccagggggaaggtttactcaaccataggcccgtgcctagtttttattggctagtgtatccgagtggcggtgcagcaggccagtcgcgtgcggcgcgagtgctttgggcgcagcccccggggccggggcgggaggtcgctcgggtcgggtgtcgcctgagaaccggatgaggcggcgaccgtgaggccgagccgggagcgggcgtcttgccgaggcccgggcgggcggggagcaacggctacagacgccgcggggccaggtcgttgagggtcggcggcgggcgaggagcgcagggcgctcgggccgggggccgccggcgccatgggcaaccgcgggatggaagagctgatcccgctggtcaacaaactgcaggacgccttcagctccatcggccagagctgccacctggacctgccgcagatcgctgtagtgggcggccagagcgccggcaagagctcggtgctggagaacttcgtgggccggtgagcgggcgcggcagggatcgcgggcgggtggcggcctagggcgcggagggcggaccgggaatggcgcgccgtgcgccgccggcgtaactgcggcgcttgcgtgcccgcggcggggaaccggacggggtcggggaggcgggccctgtgggacgccctgggcagaggactccctgcaggggctccggagcaggcccgggccccaggggcggtgtcacgggccagggcgccgtaggacaggaggtgcgctggaaccctgcggtccatctggtcccagctttcgtgggtgaagtctgccatctggttggccgtgggtctggggtagatccctcttctgctctttcgggctgtccatcagaggtgaaaccggccatctagatatctattggggcgaccgctgcggtctggctggcttgttcttgtatctggagctgcccccgccgtctggttggctgtctctctgtcctgggcaagcctccctgccaccaccatttggttgtccatctgtccagtcccacctggcagccccctgctgtctggctagctgtccagggtgacctctgctgtctggccgcccatccgtgcccctcacagactttaacactgagcagtccctctgttgggtgacaccagctggcctctactgtctgactggctagctgactcctaggggaccctgtttgattctctctggctgactcttacagcttgattcctggctagcgctggctcctctcttccgtgtgaattcttctgtctgtctggccatctcctagtctgcccatgactacccctgagtgtctggcacaacggctctggaaaggggtggtaggagggtagaggggagaacagagctgaaggaggaggtttggaccctacttcccctctcagctggaaggaggactctgggggtaccttacttcaggattcctttccgagtgctagaacacaggggcccgcctcccagctacagcctacaaattgggggccctcctttggagcctgggaaggggcttcttgcgtgatcaggcctcagtggctagcgctgggatgtagccttctctggacagccttgagaagccgcggtgtgcccatctgtccagtgggcaaactccactctctggggctgtttccaggattcaggaagcaaatgaatgagaacagcccgtgcagccacctctccctcccaccaacccctcttgcctttcttgtctcccagatgggcggccacttctccattccaggaactactcatttgtggtggtgtggctgccaaatgataacatcctcctcctgtcattattgtcattgttattgttgttatcattgtcaagggataatgtcccttcttgattcaacatcttgaatcccaagtaaggagtggggtggaggctgtgttatcatccccaccttagctgagctgggaggctcagaagggactgtgatcacccaaggccactaggctggcgtaaggccttgtgtctgccatcccagagccttggggctttgctccaagcagcacaaatctcctcttttgctaccttgtctctagctcattgccttctgtctaccgtggtggaaaggtgtggacttgcagccagctgggcctggcctgatctcaggctggactgtggtgtgggcccctttgagtgaccatcttcctgcctgcccaggcttctgggacgggggtggggggtgtttgcaaagctctgtctctttcacttgccttgtgaccttgcacaggttgtcttggcctctctaagtcttggttgactctcctaaacaagtttattttattttatttatttatttattttttttttttttgagacagagtctccctctgtcatccagtctggagtgcagtggagcaatcttggctcactgcaacctctgcctcccaggttcaggccattcttctgcctcagcctcccgagtagctgggattacaggcgtctaccaccaagcccaactaatttttgtatttttagtagagacggggtttcaccatgttggccaggctggtctcaaactacttacctcaagtgatcctcatgccttggcctcccagagtgctgggattacaggtgtgagccaccaagcctcgccccaggagttccaagaccagcctgggtaacatgacaagatgccattctacaaaaaataaaaaaattagccaggtagggtggtagtcccacacctgtagtcccagcaactcaggaggctggccctgggaggactgcttgagcccaggatgtccagactgcagtgagccgtgattgcaccattaccctccagcctgggtgacagaaccagatccggtttcaaaaaaagaaaagaaaaagtgcttacttacctaacgcactgcctggcacatagtaggtctacatggatggggctattgttgtttatctggctggttcctttgctatcagggacaaaagctaaccagaatgaaagtgctttcacgttacacacttaagccttatgagggaggcattgctataatccccattttacagagcaggaaactgaggctcagatagctgagcagaacactctcactggaggctgtaaagtgaggagttaggtgttctgggttgggaacctgggtctctctcccatccttacctctcctcagtccctctaccccttgcctttctctcctgtctaccatggtgtctggcagctgccggccagtatggagctggttcctgtggcgacctcctagaatcctgcaatgcaggagttgctcattatatatatatttttacaccgagtctcactctgttccccaggctggagtgcagtggtgttatctcagcttactgcaacctccacctcccatgttcaagcgattctcatacctcagcctcccgagtagctgggattacaggcgcgcgttaccacacccggctaatttttgtatttttagcagagatggggtttcaccatgttggccaggctggtcttgaactcctgacctcaggtgatccgcccacctcggccacccaaaatgctggcattaaaggtgtgaaccaccatggctggcctcgttaagagtattaattcagtacctgaaagccaaagttgtaaaaaggcctctctttgggtatgaggggctcaaacaaggcttacttttttttgggggggtgtaagagataaggtctctctttgttgccgaggttggagtggaggggtgcagtcctagctcattgcagcctcgaactccagggctcaagcaatcctcctgcctctgcctctaaaagcactaggattacaggtgtgagccattgcgccgagcctggattttctaaggatgtggtccgagtgggaacagcccagttagttcagccctatagctggaagtccagatcactggctctgggggccaaggcctgcctgctgggtcttttgttttacctgcgtagcttttgtttttaataagactttccagtgttagatttccagtcaatatccggatttcttgtggctctaagacactcagatctatagagttctgagttgtcatgcaaaggctgtgggcctaaggcctggttccaccatgtctggctgtgcgactcggccacgtggatttggcgttctgggcctcagattccttttctgtaagctgagggtggtaactggtaccctggggcctagatgggtgattgggtgatgcgtgccgagtgcatgtgtcttatacgcatggtggctgttgttgtaatcagtttcacctggcgttgctgagcctttgtcccttgtggcagtaatggcttcgatttcagaagcaccagtcactgtcccatcagactaagagtggccactccagctgccacagtccccactactccctagcactcacccaggcctagatcattttgcttggagcctcctggccctggaacctttgagtttgagacccctggcttgtctgcggtgcaccagcagatagaactttggccctaaggagaaaggagggcatcactccctcttgacccttgtcatttagcctcaggggctggccagaaggaaggccttaggcattcccgcaccctagcctcccgagtagctgggactgcaggcacccgccaccacgcctggctaatttttgtatttttagtagagacgaggtttcaccatgttagccaggatggtctcaatcttctgaccttgtgatccgtccacctcggcctcccaaagtgctgggattacaggcgtgagccaccgcgcctggcctgagatagggtcttatactgtcacccaggctagagtgcagtggcaccatctctgctcactgcagccttgacctcctgggctcaagcgattctcctacctctcagcctcctaagtagctgggactacaggcacgtgccaccacgcttggctaatttttcattttttgtagatacagggccttgctgtgttgcccaggctggtctcgacctcctcgcctcaaatgatcctcctgcatcagtctcccaacgtgctggcattacaggtgtgagccactgcgcccagcctcctcttcattaaaatacaagttataatagcacttctttccctttcttttttttttttgagacggagtctggctctgttgcccaggctggagtgcagtggtgcgatctcggctcactgcaatctcgcctcctgagttcaagtgattctcctgtctcagcctcccgagtagctgggactacagttgcgagccaccacacctggctaatttttttttttttttttttgagacggagtttcattcttgttgcccaggctggagtgcaatggcacgatcttggctcaccgcaacctcccctcctggtttcaagccattctcctgcctcagcctcctgagtagctgggattacaggcatgcaccaccacgcctggctaattttgtatttttagtagaggcggggttttcccgtgttggtcaggctggtctcgaactcccgacctcaggtgatctgccggccatggcctcccaaagtgctgggattacaggcgtgagccaccgtgcccggctaatttttctatttttaatagagatggggtttcgccatgttggccaggctggttccaaactcctgacctcaagtgatcttcctgccttggcctcccaaggtgctgggattgcaggtgtaagccaccgcgcccagccccgtcttctttaaaataggagttataatagcacttctttccctttcttgaatagggattaagtgagacagtttggagtgcttggcatagaagaagtgcttaaaacattaggtgttgttcgttcattaaaaaatgtttcctgagtacttttactgtgtgcctggggacatggccctgagcaagttaccagaacttctgctctggaggagctggcctttcagcaggaagcaaataaaggagaagcatgggccacttagtggctcaggcccacaatctcagctctttgggatccaggcgggaggatcacttgagcccagaagttggagaccagcctgggcaacatagaccccgtctctacaaaaaataaaaacattagctgggcatggtgacacctgtagtcccagctactcaggaggctgaggccggaggatggcttgagcctgggatttcaaggctgcagtgagctctgatcacgctactgccttccagcctgggcggaagaacgagacctcgtctcaaaaaaaaaaaaaaaggcgataagtatgatggaaaaaaggatcaaggagcaggatgagggagagatcacagttggagggggtacattttattttattatattattattctttgagacggagtctcactctgtcttccaggctggagtgcagtcacgcgatctcggctcactgcaacctccgcctcccaggttcacgccattctcttgcctcagcctcccgagtagctgggattacaggcgcctgccaccaggcccggctaattttttgtatttttagtagagatggagtttcaccatgttagccaggatggtctcgatctcctgacttcgtgatccgcccgcctcggcctcccaaagtgctgggataacaggcgtgagccactgcgcctggccagagggggtacattttaaatagggaaattggtgacatttgagcagagccttgaaggaggcgaggaaggaacccctggagacgggaagagaatccagtgcaaaggtcctgatgtgggaggatgcccggaggccagtttagcaggccagtggagggagatcagatctgggagatattagggtgggaccaggcctctaggaacattgtgggcagggaggctgtctgagcagagggaagtaaagctggtggcgctactgctgtccctctggacctggccaagctgagggctctctcctttgatttccagcttcaactcagttttctcagtaagcagactccacaggcatgtaggcgccccgtgccatttttcttttaataagaagcagctgtgccggggatgctggcgtttccagctgcgtttttatttggcctttggtgatgtgtccctccagggatatgtggatgagccgcgggggcactgcctgtgcctcagtgggtgctgcaccagtgcacatcggatgcccgttggctcctgtccctgacagatggaggggcacgtgatgtgttccttgggctggtttgtccctttaacagatcttattagtttagagccacttggaaatgacatcttctgtttccagtgactttccttttgggcaaagacaaattgcatcttgaaaaggccatacatggccgggcatggtgactcacacctgtaatcccagcattttgggaggccgaggcaggcagatcacaaggttgggagtttgagaccagcctggccaacatagtgaatcccgatctctactaaaaatacaaaaattagccaggtgtggtggcgcatgcctttagtcccagctatttgggaggctgaggcaggagaatcacttgaacccaggaggaggaacttgcagtaagcggagatcacgccattgcactccagcctgggggacagagtgagactccatctcaaaaaaaaaaaaaaaaggaaaaaaggaaaggccatgcaaggctcggttagggtggtctgcagtgctgggcctgctggaattggtacagtccagagggatctgtgggaatatggaaggcttggttctgccacacaccaaaaaagtgacctcacttctctgggcctcagtttcctcatctggaaaatgggaacatggtggtctctgcctactgggagtggactgagaatcacgtagcaaattgttgtgaaacaggcagcatttgtgatctcgttggttggcttttgtctccttttatctgggatcaggactctgatgacaggtgtacgtttcttttctcttgctctgtcccccagactggagtacagtggcgtaatcatggctcactgcagcctccaactcctgggttcaggtggtcctctcacctgagtctcctgagtagctgggactataggcatgagccaccacacctggctaattacaaaaaaatttttttggcagggagcgatggctcacacttgtattcccagcacttggggaggccgaggcgggcggatcacggggtcaagagattgagaccatcctggccaacatggtgaaaccctgtctctactaaaaatccaaaaattaggtgggtgtggtggctctcacctgtagtcccagctgctcgggaggctgaggcaggagaatcgcttgaacctgggaggcggaggttgcagtgagccgagatcgtgccactgcactccagcctgggcgacagagcgagactctgcctcaaaaaaaaaaaatttttttttttttagagacagggtcttactttgttgctcagtttggtgtcaaactcctgggcccaagcgatcctcctgccttggcttcccaaagtggtggaattacaggtgtgagccgccgaacccggccttagtttctttttccttaaagagaaggaactcatcattactctgttgatataaatggagtgcctatcagtgcaggcaatgttcttgctctggggatacagccaggaccaggacatgcaggcacgccctgttccccagatcctgaaatatcgaccagaagttgttcctggttcctttctaagtgggaatcatggctgcaaacaagtaattggccgtgagagttatttacacacattttgtgtacggtgatgagaaatgggagaaaaaatgcccagcatcggatcaccagaggtcaggagttcgagaccagcctggccaacatggtgaaccctcatctctactaaaaatacaaaaattagccgggcgtggtggcaggcgcctgtaatcccagctattcgggaggctgaggcggagaatcgcttgaacctgggggacggaggttgcggtaagccgagattgcgccgctgcactccagcctgggcaacagagcgagactctgtctcaaaacaaacaaacaaacaaaaaccaatgataggggatttggccagataagcgtgtccagacaaccgactatcaactcgctactcagagggatctagaagaatctttaatgacccagaaagctgcacaagacctgttaggtaccagatgaaatgggctgtgggatcctgtcttgtttaaaacgattgtatttgctcagtgaaaagaccggaaagacatactctgccctaaccccacatgtgaatcgtctccccatgtgattcttggtttgtttttgctggtttggggattaggtttataatcaggaagacagatttctccaaagctgcgctctaggctgtccaagtgctttttcagagttacttattgacggataacagcccttgataggttcataacattgaaatcccctggtaataacctggattgtttctggatgagggcggaagatggccttggggacagttgtagatttagagaggaggttttcttttcttttctttttctttttttgtttttttttgagacgggatctcactctgttgcctaggctgaaatgcagtggcgtgatcacagctcacagcaacctcaacttcctgggctcaagggatcttcccacttcagcctcccaattagctgggaccacaggtgtgcgccaccacccccagctaattttaagaaattttttgtagaggtggggtctcattattttttgcccaggctagtctcaaacccctgggctcaagtgattctcctgcctcggcttcccaaagtgctgggattacaggcaagagccacggcacccggcctaggttagatttagagttttcagagttggcttaggcggtagaggctggcctttgaatggaaccctgtctcgctgtcgctctcagcgtttatatttggctcagagccacatctgccaaacttctgcccgatttgaatgaaagtgctgaaattataggcccctcggctgctgaaaaaaagtgagaacatcatgtaaaccgtaatttactgggattgccaactacaagctgtaattaagcccttattgtgttaaagctttggaaaaatccaagccaataatgagatatttatagggcattagctacaatctgaataaagggaaaatgtggccctgcgtctgaagcaggactgcaaagagaggaaagacgcctgcttccgggtgcgttttgggtttctgtgaatattggtaactaggtccctgctgggtggtgggaaattttcccctgtggcgtcacccgtagcttgaaccgggagctggatgactgtttcagtttcatctgctgctggacatttatgatgttaagagccagtgtttatggagaatcaccgtgtgccacatgtgcaagatctgaccagtgtcttctctgcccaggggtggcagctgctgctcttagcatccctgctttataggtagagaaactgaggccagagagggagactggcctgaagtcacacagggaggaggacagaggagttggagcttgaactggatgtgggccctctagagccacacatatggcggctttgggtgggaaggtgtgggcctgactcttgagagcagggctgaatggtgggcaccatggcgtttgtatctgaggactgggccaagattacagagggagtgagcaacgcgtggctttggatatgcatcgaggttgtcagctctgtgtccagcctgcgtgtggtaagcagcaaccactctacaccagttgctgggcacccagcagggactgggacagacaggacaggtgaacagttaaatgagcaagaacattctggggcaggcacaggggctcacacctgtaatcccagcactttgagaggccaaggcgggcagatcacttgaagccaggtgttcgagaccagcctggccagcatggcgagccccatctctaccaaaaatacaaaaattagctgagcatggtggtacttgtctgtcgtcccagctacttagcaggctaaggtgggaggatctcctgagcccaggaattcgaggttgcattgagctatgattgcaccactgcgctccagcctgggtgacagcaagacccggtctcaaaaaaaaaaaaaggctgtatgcggtggttcacgcctgtaatcccaacactttgggaggctgaggtgggagttcgagaccagcctggccaacatggcgaaaccccatctctactaaaaatataggcaggagaatggcgtgaacccgggaggcggagcttgcagtgagccgagatcgcaccactgcactccagcctgggcgacagagcgagactccgtctcaaaaaaaaaaaaaaaaaaaaaaaaaatataaaaaattagccaagcatggtggcgggcacctgtaatcccagctactcgggaggctgaggcaggagaattacttgaaggttgcagtgatccgaggtggaggttgcagtaatccgagatcatgccacggccctccagcctgggcaacaagagcgaaactctatctcaaaaaaaacaaaaataaaaatattctgaagagtgagaagcggtttgccctgtactgcattgggtgggggaatggctgcagggggctgcttcacatgtggcttgttgggatgggtgtcctgcagtggaatagccccgccaggacttgggggaacagcatcgcaggccagggaaacagcaggtgcagaggcctcgcacacacccggcccgctgagtgccccctgcggaccggaaaggaccagtaggcacgtgagagttaggacgctgcccgtggaatgccgacttttctaaatttgaattacgcaagtagagcgtggagacagtgttcttggaaaaagggaaaccattacagatgaggaagagcacactgcccagcccgtcccttcctccagctctacctgggagcaccactgtcacttcagggtatgtctagccagacccctctggtgtttctgtacttaggtacatgctggtacctatagagaatacgtggcaccattatgggtggttattttttttttttttggaacaggtctcactctgtcacccaggctggagtgcagtggcacagtcatggctcgctgcagccttgacatcctgtgctcaagccatcctcctacctcagcctcctgagtacctgggacaacaaccacatgccaccacgcccaactaatgtttataatcttttgtacagatggggtttctctatgttgccaaggctggtctcaaactcctgggctcatgcgatcctttcacgttggccccccaaagtactgggattgtagacatgagccacctctcccagccacgtgcatatatttgttgaatgaaagtagctaaaggctggaagtggtgactcacgcctgtaatcccagcactatgggaggccgaggcaacatggcttgagctcaggagtttgagaccagcctgggcaacatggtgagacctcgtctctaccaaaaatacaaaaattagcaggcgtggtggtgcatgcctgtactcttagctacttggaatcccgaggtgcgaggatcccttgagctagggtagcggtggaacttgcagtgagcccacactgtgccattgcactgcagcgtgggtgacagagcgagaccctgtctcaaaaaaaaaaaagtagctaaaaaccagaatggagtgaatttcactgcacagtcatggaggggaccaggcagaggacagccctgggtcttggttttggagactcacagcctgcctggggatgcagggaccctgaagcaaggacatcttcctttggaggaagtggagatttgctccatctatataaagagtaataacagtaataggctgagaccctgaggctgggcagcgtgggtgtctatctgcgttggcttcgagggctgtaagatggggctagcagcgtcccctccagggtgggagtgaggccctgtatggcaacctgcggggtgccccctctgacttttgcttcctgcctggctgctcagtggccctggcaggggcaggcaccactgctctttctgttacaagagacctcctttggataaatctgaacacgctcccatggcagacctatggggcggtagacaagaggccagcagagctgtcccaggccctggtgacacctccatgcccaggtgaaggaggagcaggctacttggagcctgccctgtgacacactttcgcggtgatgagagcttctcagggctgcgatcctggcgggccagtcaagcgggcaggagcagccccagccagggtgaccctgcctgctgggtgatacgccctggcacgaccaggccagccctggggaaagcccccagggcggatcagggagggacacagctgtcctggccatgagacttctgtcttttgtatggatacacagggtccttctagagggtcacagcctccacccccgggaggcctaccagctggccgcgcagccaggatcctgcagccaccaggacactgcctttccaggttgttcttttcttttccttctttttttttttttttttgaggcagagtctcacagtgtcgcccgggctggagtgcaatgcatgatctcagctcactgcaacctccacctcctgggttcaagtgattctcctgcctcagcctcctgagtagctgggattacaggtgtgcaccaccacgcctggctaattttttgtatttttagtagagatggggttttgccatgttggccaggctggtctcgaactcctggcctcaggtgatccacccgcctcggcctcccaaggctctgggattacaggcgtgagccgccgtgcccggcccccaggttgttcttttctacatcaacatcaggggacagtgactgagagaggccacgagccactggctcagcttgacgaaggcttcctgtggtttgggttgatgtatctctctgtcttgcaacactgagttccccgttgtctgggcggaagccagtcagacggaagcccggcttctgtggtgcctgccctggtggcctggacaggttgctgggaagctcaggtcaggctgctttctgaggtggggaggccccacctggaatgtgctcccagcactgggtgaaaattgatgcacaggcttgattttttttttttttttttgagacggagtttcgctgttgttgcccaggctggagtgcaatggtgcaatctcggctcgctgcaacctccgcctcccaggttcaagcgattcttctgcctcagcctcccgagtagctgtgattacaggcgtgcaccatcacacccggctaattttttgtatttttagtagagactgggtttcaccatggccagactggtcttgaactcctgacctcaggttatccgcctgcttcagcctcccagagtgctgggattacaggcatgagccaccgcgcccttaaactcttttctgttaaaggagttattcaactgtttactcgttgtggagaaaaaaaaaaaaaaaaaaacaggccgggcggtggctcatgcctgtaatcccagcactttgggaggccgaggcgggcggatcacgaggtcaggagattgagaccatcctgactaacacggtgaaaccccacctctactaaaaatacaaagaattagctgggcgtggtggcgagcgcctgtagtcccagctactcgggaggctgaggcaagagaatggtgtgaacccaggaggcggagcttgcagtgagccgagatcgcgccactgcactcccgcctgggtgatagagcgagactccgtctcaaaaaaaaaggaaaaacaattcaccctgtccggaagtgcacagagtaaggctgggtgtcctttgcatgggaacgacctctagcagtctgtggctcttgccagattttttatatatatatatatatttctaggtgtgactacccccgactcatccaaccagtgagcctataagtctagtaacaaacgctcccgctccacagtccaaagtctcaacagaatgtgactgtcttgcaccaggtccctgctatatttagtgcctccaagaatgtttggcttttgttttctgttttttttttcttttgagacaaagtctcgctcttgttccccaggctggagtgcaatggcgcgatctcggctcactgcaagctccgcctcccaggttcaagcgattctcctgcctcagcctcccgagtagctgggattacagacacctgtcaccatgcccagctaatttttgtagttttagtagagatggggtttcaccatgttggccaggctagtcttgaactcccgacctcaggtgatccaccctcctcggcctcccaaagtgctgggattaccagtgtgagccaccgcgcctgggctggtgtggtttttttttttttttttggagacagggtcccactctttcacccaggttggagtgcagtggcatgatgtcggcttactgcaacctccccctctcgggctcaaaccattctcccaccacagcctcccaactagctgggaccacaggcgcgcaccacaatggccggcattttttttttattttcggtagagacagggtttctccatgttgcccaggctggtcttgaactcctgagctcaggtaatctgcctgcctcagcctcccaaagtgctgggattgtaagcatgagccacaacgccctgcctagaaataattttagatttagagaaaataaataagcttcaaatttacagaaagtacaaagataacacagagagctcctgtacatccttcaccagtgtcctctaattttatatttcttacaaccaagaaattaacctagctactcaggaggctgaggcgggaggattgcttgagtctaggagttaaagcccagctttggcaacataacctcttctctaaaaataaatgaatgaggccggacatggtggctcacgcctgtaatcccagcactttgggaggcagaggcaggtggatcacctgaggtcaggagttcaagaccagcctggccaacatagcgaaaccccatctctactaaaaatacaaaaaattagccaggtgtggggacatgtgcctgtagtcccagctatttgggaggctgaggcaggagaattgcttaaacctgggaagcggaggctgcagtgagccgagatcgcgccactgtacttcagcctggacaacaaaaggagactccatctcaaaaaataaaaaaaaaaaaatgaatgaatgaaattaaccttggtatactactattaagtgaggcctggcgggatgttgtggctcacactgtaatctcagcactttgggaggccaaggtgggtggatcacttgaggccaggagtttgagaccagcctagacaacatatcaaaaccctgtctctacaaaaaattgagtgtggtggtatacacctgtagtcccagccactcgggaggctgaggtaggagaattgcttgaacctgagaggccaaggttgccatgagctgagatcaagccactgcactccagcttgggcaacagagggggactctgtctcaaaaaaaaaaaaaaaaggaagggaggccaggtacagtggctcacacctgtaatcccagcactttgggaggctagattgcttgagcccaggagttttagaccagcctgggcaatatagtgagacctcgtgtgtagaaaaaaaaaaaaattagcttggcctggtggtgctcacctggagtcccagctcctctggaggctgagacaggaggatcacttgagccctggaggttgaggctgcagtgagtgatgattgcaccattgcacaccagcccgggcaacagagccagaccctgtctcaaaaaaaaaaaaaaaaaaaaaaagccaaagccagaatgtacagatttcttcaatttttcccatatgagactaatttaaaaaaaaattttttttttttatcgagatgggggtcttgctgtctggaagtatacatactgagaaattttatttttcaaacaaaatcaccccttttcctgtcttaggactggacattgcatctagttgtcggatctccttaagcctttttctggtctgggaagcaactcagcccttccttgttttttataaccttggtaagtcatggaatgtccctcaattagggcttatctggaattcttcatggtgagcctggggtgtgagttttggggaagaaggccattggtgaggtgcccctctcttctgtgaatctttttttgtttgtttgttttttgtttttgtttttttgagatggagtcttgctctgtcgcccaggctggagtgcagcggcgcgatctcagctcactgcaagctctgcctcctgggttcacgccattctcctgcctcagcctcccgagtagctgggattacaggctgccaccatgcccggctaatttttgtatttttttttagacggggtttcaccgtgttagccaggatggtctcgatctcctgacctcatgatctgcccgcctctgcctcccagagtgctgggattacaggcgtaagccacctcgtccagccatcttctgtgaatcttatcaggagtataggataccaacaagactgataaattattgacagtgataactgatgatgctgaccttgatctcttggctgaggtaggcttgctaggtttccccactggaaagttactagttttcttcttttcatactctatcctttgggatcatggaaaattttatttttattttatttttggagagtctcgctctgtcatctaggctggagtgcaatggtgtgatattggctcactgcgacctccgcctcccggattcaagcgattctcctgcctcagccgcttgagcagctgagactacaggcgcccaccaccacgcccggctaatttttttttttcaagagatggggtctcgctgtgttgctcaggctagtctcaaactcctagactcatgtaataatcctcttgcctctggctcccaaagtgctgggattacaggcattaaccactgtgcccggccttttctggcactattgaaaagaccatcctttctccctaaagttgcttttgtctggaattagttggccatatttgtgtgggtccaacctgaactgtctgttctgtgacgttgatgtatggctctgtcctttctccaaaaccacatatctttcttctctttttagatagagatgggggctgggcacagtggctgacgcctgtaatcctaacactttggaggcaggtggatcacttgaggtcaggagtttgaaactggcctggccaacatggtgaaactccgtctctactaaaaatacaaaaaaattagctgggcgtggtggtgggtgcctgtaatcccagctaattgggagactgaggcaggagaatcacttgaacacgggaggtggaggttgcagtgagccaagatcgcgctattgcactccagcctgggcaacagagtgagactctgtctcaaaaaaaaaaaaaaagaaaaaaagaaaaaaatagagatggggtctcacaatgttgcctaggctggtttcaaactactgggctggtgatgctcctgcctcagccttccacagtgctggcattatgggcgtgagccaccacgcccactcatttctatattgctgtagctttatagtaagacttgaaatcaggccatgtgagtcctcttttttcttgtttctcaaaattgttttgtctagtctagttcctttgcctccacatatatattttagaatcagcttgttgatttcatagaaaagatcattgtgtattagtacgtggaaagccacggtattagttttttgtttgtttgtttgtttgtttagacaaagtctctctctggcacccaggctggtgtgccaatagtgttgggattacaggcgtgaaccactgtgcccagctggtactggtttttataactgtgtattattccatccactgtcactacttccccaggaccagtacagtttctgcctcctcagtcttgcacctttaaccttgtcctcacccccaggctgttctccctgcagtggacagagggagcctgttaagaatatccttcctagctgggcgccgtggcttacgctgtaatcccagcactttgggaggccgaggtggaaggatctcttgagcccaggagtacgagaccagcctgggcaacataacgagacccccatctctacaaaacatttaaaaattagccaggcatggcagcgcatacttacagtcccagctactcaggaggctgaggtgggaggattgcttgaacccaggaatttgaggctgaagtgagctgtgatcctgtcagtgcactccagccggggagacagagggagaccctatatccttcctctacttggaatcctccctggccctcagttccctcagggtaaaaatgaagtcgtccctgaggctccatgatgttctcatgcaggtgaggcgctgtcctacctcatggctttttcacatgctgcttccactgcctgcactgcccttcccccagataaccctgtggctcatttcatcagcattctaaggcctctgcttaaaagcctccttctcaaaaggctctccccctggccactctgctcaaacgccccaccctgttctctctgtccccttcccctgcttaatttttcttggaaccacttgtcattcctgtcattgttccacctatgcgtttggtttcttgttttctttttttggggtggagtcttgctctgactcccaggctggagtggagtggcgatcttggctcactgcaacctctgcttcccgggttcaagcgattctcctgcctcagcctcccaagtagctgggattacaggcgcacgtcaacatgcccgtatatttttgtatttttagtagagacgaggtttcactatgttggccaggctgatctcgaactgctgacttcaggtgatctgccagccttggcctcccaaagtgctgtgattacaggcatgagccaccgcacccggcctatttgtttgatttctctttctgtctccccccactagaaggggaatgccccatggtagggcggtgcccctggctgtagcgcagtcccttgcatggtgcctggcatgcgataggtaatcggggcacccatctccctctcgggatgcactcattgatgtacttgtcaatcactgagcaagacccactcagcaatgtctgctgagcctgctctgtgccaggctctgacctgaactgccacccttctggagtcaaacaggcctggttgccaccaagaggagttaggcctggcagaggagacaagcattagtctcacaacagaaggaagtaggccggacgtggtggctcatgcttgtaatcccagcactttggaaggccgaggtgggcagatcatctgaggctgggaggtggaggttgcagtgagccaagatcacgccgctgtactccagcttgggtgaaagagcgagactccatctcaaaaaataaataaataaataaataaataaaaaggaagtggagactttcattgagatcagtatcaaagggcacgaggtggcagggcatggtggctcacgcccatagacccagcactttgggaggctgaggtgggaggattgcttgagcccaggagtttgataccagcctgggcaatatagtgagacctcatgtcaacaaaaacagacaaaacaaaaaaaacaggggagggagggctacaggagggtgggatgaggactggccacagttggaggccaggcccttcctggggatcccagcggttgttactctttaagaaggacctggcctggtgtggtggctcacgcctgtgatcccagcactttgggaggttgaggcgggtggatcacttgaggtcaggagttgaagaccatcctggccaacatggcaaaaccccatctctatgaaaaatacaaaaaaaagttagttagctgggcgtggtggtgggtgcctgtaatcccagctacttgggaggctaaggcaggagaagtgcctgaacccaggaggcagaggttgctgtgagctgagatcgcaccgttgcactccagcctgggcaacaagagcaaaactccatcgcaaaaaaaaaaaaaaaaggctgggctcagtgactcacgcctgtaatcccagcactttgggaggccgaggtgggcggatcacgaggtcaggagattgagaccatcctggctaacacggtgaaaccccgtctctactaaaaatacaaaagattagcggggcgtggtagcgggcgcctgtactgtagtcccagctactcaggaggctgaggcaggagaatggcttgaatcctggaggaggagcttgcagtgagccgagatcacgccactgcactccagcctgggcgacagagcgagactccgtctcaaaaataaataaataaataaaagaaggacgtgttcccttgttcttctatggggacatggggaactcctgtactgttttattttcctgaaatatttttattgaaatataattcacataccataatacctaatccttttgaaatatactattcagtggattttagtatattcacagttgtgtaaccagcaccactatctgattttgtagcactttcatttcccctaaacccatacatatgaagcagttcctccctcccccagcacctggaagccactaatgtcctttctgtctgtgaatttgccaattttggatatttcctataaatggaatcttacagtatatggccttttgtgtgtggctttgtttatttagcatcatgttttcaagattcatccatgctggttgggtgcagtggcgcacgcctgtaatcccagcatttgggaggctgaggcgggcagatcacttgagggcaggaattgatgagaccagcctgcccaacatggtgaaaccccttctctactaaaaatacaaaaattagctgggtgtagtggcacatgcctgtaattccagctactctgggtggctgaggcacgagaatctcttgaacctggggggcaaggttgcagtgagccgagatcactccactgcactctagcctgggcaacagagcaagactctctctctctctcaaaaaaaaaaaaaaaaaaaaaaaaaagaattcaccaatgaagccacctgggcctggacttttctttgtgggacgttttttgaatactaattaaatttcttgtacatctattgagtttttctgtgtcttcttgagtcagtttcagtaatttgggtctttctaggaatttgtccatttcatctagggtgtatttaatttgttagaatagtattcccttatcatcttttttatttctgaaaggttggtagtgatgtctcctctttatttctgatttttgtaatttgagtcttatctctttttctcttggttaatctagctaaaggtttgtcagtttggttgatctattcaaagagcaaattgtggtggtgttaacttctctctccatttttttagtctctttatttcttctctaattatttccttcttttctctttggatttggtttaccctccttttctgaggttcttgaagtggaagattattgaaatctgaaagtatttgaaatctttctcttttttttgttttttttttttgagacggagtctcgctctgtcgcccaggctggagtgcagtggcacgatcttggctcactgcaagctccgcctcccaggttcacgccatcctcgtgcctcagcctcctgagtagctgggactacaggcacccaccaccatgcctggctaatttttgtatttttggtggagacggggtttcaccatgttggtgaggctggtctcaaactcctgacctcaggtgatccacccacctcggcctcttaaaagtgtggggattacaggcgtaagccaccgcgcccggccaaaatcttccttctttttaaatacagttgcttacatctatgaatttccctgtaaacctgctttagctgcatccataagttttgatatgttgtgttttcattttcatttatctcagcatatcttctcatttctcttatgatttcttctttgatacataggttatttagcagtatgttcatttctatatatttgagaatttctgaaaaacatctttcttgtgttcatttctaacttcatttcactgtggttggaggaactactttgtatgatttcaatctctttaaaattattgagtcatgttttatggcttggcctcgaatacggtgtgtcctggagaatgttccatatgcacatgataagaatgtgtattttactcttgggtggagtgttctgtacacatctgtcaggtcttattggtttcgtattttctatttccttgttatcttttatttggttgttccatccattattattatttttcttgcctgataccaatgctgatatccatccatgattgaaagtggggtattgaagtctccaactttctttctttcttttttcttttctttttggagacacggtcttgctctgtctcccaggctggaaacgtggtggcatgatcatagctcactgtagcttctgtctcctgggctcacatgatcctcccacctctgcctcccgagtagctgggaccacaggcgtgtgccacacccgactaatttttgtattttttctagaggtagggtcttgctatattgaccaggctggccttgaactcttgggctcaagtgatcctctcatcttggcctcccaaagtgctgagattacaggcatgagccactgtgctcagccccaaattggccaatatttctttcttttttttttttttttgagacagagtcttgctctgtcgcccaggctggagtgcagtggcgcgatcttggctcactgcaagctccgcctcccgggttcacgccattctcctgcctcagcctcccaagtagctgggagtacaggtgtccgccaccatgcccggctaattttttttgtatttttagtagagacggggtttcaccgtgttagccaggatggtctctatctcctgaccttgtgatccacccgcctctgcctcccaaagtgctgggattacaggcgtgagccaccacgcctggccaatatttcttttgttctgtgctttttccttcctccctcccttcctctttaccttcctctttaccttcctctttccctccctcccttctttccttccttccttcctttttgttcttgttcttttctttttcctctacccttctttcttttccttctttctttttttctttctttgtttttgcttgattgcagcatcatgagagagtcctgtgcttttttatagctgcaagtattcctgggtcgagcctactcccactaacactgatcactctcccccttgaatttttaggttatttctagtttttcccctcctgccagagacttgggggtccgcaggcttgtgtgtctgctatgctcagggtggataccctgcaagggagtgccatgttgcatcagaagtggatttagagtgatgttgccaggcccaccaggaaaggctgtgccaaggctctttgctggggtgccaagaagaagggtctgtgcctgttgtggtgccaggcattgacatccttcactcccacccccgtcaccctcatgaactagtgaactagtcctgtggaatagggccttatgcgtgctagaccctgggtttgtcctgctgacaaccccatagtgtaggtgctgttatcccaatttcatagagaaactgagggctggggaagtggcagccttcattcagttcctgccgtgaggctgtggctgagctgccaggctgcagagtcttcacccaatgatcttgctcagttgtccccatgaggaagctgagcctggccttcctgtctctggagtccaaggtttcctttccttgtgtgcccctggaagtgctgtgtggtgaccgggatggtgcctggcagatggagattagacgcaggttggattggtgcctcattggtcaggagggctgctcttagctgtgtgccaatagaccggatgacttaatctctctatccttggtttccccatctgcaaaacagggttggccagagccctgtgaaggtggaagaaggccctgtgtgcctggagctttgtgcagtgccctggagatgctagcttgtttttctttcttttttttttttttttttgagacagagtctccctctgtcatgcaggttgtggtgcagtggctcagtctccgctgactgcagcctcaacctcctgggctcaagtgatcctcccacctcagcctctcaagtagctgggaccacaggcgtgtgccaccacgcccggctaattttttgtagaggcgaggtttcatcatgttgcccaggctggtcttgaactcctgagctcaggtgttccgcctgccatggcctcccaaaatactaggattacaggtgtgagccaccacgcccggccgtgatgccagcttcttttgccgtgcagctagcatttgctgaacacctgctgtgtgccagatagtgtgctggaggcagggcagtgaacaagacagacgagatccctgtcctgtggagctgatgctctagctgggggcctgaggggtgggaaggaagcacaggtgctcgggtgagaaaaaacatcatgcggccaggcatggtggctcacacctgtaatcccagatctttgggaggctgaggcaggcggatcatctgaggtcatgagttcgagaccagccttgcaaaaccccgtctctactaaaaatacaaaaattagccaggtgtggctgggtgtggtggctcacacctgtaatcccagcactttgggaggcggaggcaggtggatcacaaggtcaggagatcgagaccatcctggctaatatggtaaaactccgtctctactaaaaatacaaaaaattagccgggtgtggtggcgggtgcttgtagtcccagctactcaggaggctgaggcaggaggatggcatgaacccgggaggcggagcttgcagtgagccgagattgcgccactgcactccagcctgggtgacaaagcgagactctgtctcaaaaaaaaaaaaaaaaaaaaaaaaaaaattagccgtgtgtggtggcgtgcgcctgtagtcccagctacttgggaggctgaggcagcagaattgcttgaactcgggaggcaaggttgcagtgagccaagatcacgccattgcactccagccagggcagcagagcgagactgtttccagaaaaaaaaaaaaaatacaaaaattagccagacgtggtagcatacgcccgtagtcccagctgcttaggaggctgaggcaggaaaatcacttgagcccaggaggcggaggttgcaatgagccaagatcctgccactacacttcggctggggtgacagagccagactccatctaaaaaaaaaaaaaattctttaaaaatcaggcacacagtgtgatctgacttgcagttttccaagcctgtggggcagggagcctgggggaggctttgccctgagatgggagacttggcctcaggacattagagcgaaacagaggaggaggggatgggtctggatatccaaggcaggatctgccgagagatacgctgtgggggtgggacaaagacctcaagaacgggtccgggctgttcctgtcacttgtgacattgtggactgagtctgcctggatatttccttatgggctggctccccatcaccccgggagagtctcggggtggagggaactagaacgtgtttgcctggaggtcactacctactcccctggaaggaaggggctccaggaggctggctgtggaatgcagactgtgggtggtgcccggctgcctgcctctagttcacttgggccctcagggtggtacagagctggaaatccatacatggctgaccaccctgtaagggctgcagacacagtgagcgttcactttgccctggcaactggaactgtctcctccagtcctcaccacaaccgttttacagagcaggacacctgttgcaagatgggagagactttgctaacaaggtcccacagctggcactcaccaggctggctggggtactcaggccaccccttgcagtggggagcagttaggatgacaccgaggacacccctaggagggcggagttgtgagctccaggaccccacatttgagcagtttccccgtcactcttgaaaatgctgctgggccggccagtttctttggggtttctcagtactgctgaaagttacaaggtcaacactggcctgcaatcacagttataaaaaagttataaaagcctgacattcaaatcacgttggagactataaaacagcaagtttttcatttgcacacctcacatgacctcaagcctgctgtccatacacaggaaatggggatgtgcggaaaaaaaacccgaagtggaggacatcatcccccacgcataatccagtccgtgcatcgcacttgaccttcggcactgcagcctgcattgctccccggactagctcccaagattgatttagccagttccctgccagtggacatttaggtcattatcggttttcattccacaaagtactgccctcagggagtcggctgtccttgccaaaccactgcattaatatgtttctgggtgctggggaaagggcgcttaagacccctgccctcaaggtgttgatattctagttgggactgttagataaatgagcaattaggctgggcacgcttgaaatcccagggctttgggaggctgaggtgggaggatcgcctaggcagcatatcactacagaaaaacacaaataaaaaaagttagctgggcgtggtggcaagtgcctgtagtccgagctactcaggaggctgagggaggaggatcgcttcagcccaggagtttgaggctgcagtcagctatgattgcatcactgcactccagcctggatgacagagtgagatcctgtctctgaaaaaagaggtgcaaataaaccagaaaagtaccaactagtgggcagtgctgtgtttagaaggaaaacagggcaacatgaaggggaggtgggcatcagtaggggacagacctctctgaggaggtgacatctgagttgagtccctggtaaccggagatagccaggattgtggaaatacttggaggagatgagatggtctttcgaagcaggaggccagcatgtgcaaaggccctgcgacagcaatgtctggcctccttgctgtttctttttatttcattttttgagacggagtctcactctgacctatgctggagtgcagtggcatgatcttggctcactgcaacctctgcctcccaggttcaagcgattctcgtgcctcagcctcctgagcagctaggagtacaggcacacgccaccacaccccactaatttttctgtatttttagtagagacaaggtttcaccatgttggccaggctgctctcgaactctggacctcaggtgatccacccacctcggccttccaaagtgctggcattacaggtgtgagctaccacgcccggcctttttgctgtttcttgaccaccaatgtggctggaggcagggagtgagggggtggtgggggaggagggcacggaggtgacagggccatggggggcacttgggaactgtcaaaccgtcaaatgttatgagcagaggagggtcatgttcttacattgtatcgagttttcctttttgtttttttgagatggagtttcactcttattgcccaggcaggagtgtaatggtgtgatcttggctgactgtaacctctgcctcccaggttcaagcgattctcccacctcagcctcccgagtagctgagattacaggcatgcaccacacctggctaattttgtatttttagtagagacggggtttctccctgttggtcaggctggtctcgaactcccaacctcaggtgatctacctgcctcggtctcccaaagtgccgggattacaggtgtgagcaaccgtgccggctttttttttgttttttgttttttttttttttgagacagtctcactctgttgcccaggctggagtgcaatggcatgatctcacaatctcagctcactgtgacctctgcctcctgggttcaagcggttttcctgcctcagcctctcgagtagctgggattacaggtgcccaccaccacgcctggctaatttttgtatttttagtagagacggagtttctccatgttggccaagctggtctcaaactcctgacctcgggtgatctgcccgcctcggccccgcaaagtgctgagattacaggcatgagccaccgcactcaaccaattttttttttttttttagtagtagagacagggtctcatcatgttgcccaggctggtttcaaactcctgggctcaagagattgcgtgccaaggtgctgggattataggcacgaaccactgtgctcagcctgagttttactttgattcgatggggcgaatgttctcttttgggtatcatggtaagagtttcacaaacccttccacctcctctctgaggcaggtggcatcattcccacataacagattgggaaactgaggcacaaagaggttacctgacctgcccatcttgtccagaaaggaaatactggattccagccagggcctggagagtcccagagccacgatcacgaattgccacaggtcacctcctgcttttgctcccagcctgttgtgtcccttggatgagaccagggagcaggtgatgccacggcttgagtgccaagggcgggcctcgagccgggagctgcaggattcctgatcagggaggggctgctgggctgggaatgttggggaggagtgaggccaggagtggattgtggaagtgagaagtctcctcatctgtaaaatggcagatttggcccattgttctgcaagcattggtcatctgcctcctgcctgggtgtgtgttgggtactggggagagagcagagaaggggccgatacgggaccctgcgcccatgaggctgccactctaataggatgttgaggtgggggcagggacagactgcagctgggtgaacacatcaggaacccggaagatgccagttgtgagtggcactgagcattgagcgggttgatgtgtgaaagaaggggagcagcttcctatggcggggggagggagggtgcagtttgctgggagctgcccgcctgctctgttaatgctgcaggaagaaggttccaggctgagggaacagcctgggcaaaggccctggggcaggacagtgtctggtgtgtttcgggaacatggaggaggcatatgtggctggagtaaagccagcaagacagagagtagggggaggtgaggacaggaaggtgacaggacaggtcgtgcagggcttggggggctgcagggaaaagtctggcttttattccaagtgaagcgggagcccaaggagggcccataacaaaggggtttacagtgacatggtgtgcacaggcaccttgtggctgctttgtgggaggcagattgtggggaccaagggcacgactgcactggtgtaggcaggtgacagtgggacacgctgacagccttggacgtggagggaattgagcagaatcaggcctgatgtggaggtgaaaccagcaggactcgcggctggacaaggcgggtgggtgagggccaggggagccccaggtctgcagcctcgtgaggggtttctcccctccctgccctttggggtgaccacagggatgcagtggcacctacctgcggacactgtgtgggccgagcactgtaaggcttgggcgtccttgctgggtgaccaatggctattgttggaaggatgaggcagggaccgaggtgggcagaggagactgggcatgggtccccacttctgctccaacagagcgacagagaagcccctgaggtgggtgcgggtgactgcgggtctgcctcattggtgtcccacccacattcgtgtcctggctctgctcctccctcgctgagcgtcctgggcaagtcctgagactgaacctcagtccacctgtctgaaatgggacttttggccctggcatccttgtgactttcaacccctctggggttgtcagaggatttgccgctatgttgcccgagatggggttagagacagcctgttgggtggccagcgttccttgtgtggctcttatcagagtcctgagagaagaggccagggtggaaattggccctggagtgtgggctcctgccgaagcctcttcctgtggccagtgccatgctgaaggctggctgtggtgtcacgtgagccctcccagccacattcaggctcaaagagactgtgctgagcatatggtgacaaggaagggatcccagcccagggtcctggccaggccctgccagcaccaggctgcacaggtgaggggtggcttgccctggggtgctggctctgggccacactgctgactcaccctctgtgggcttatctgttgattctccctcccatgggaaggctctgggtttgagcctgcatcgttcctgcacgtagccgtccccaccctcataggggctggaagtcaaaaggcgcctggtggagccttgtggtctgttcaaaaaacggtaaataaacagcctgggcttctgatctgctggactcaacctggcacctctcccatcgctgctgggtgctgcctcccagctgcacccttccctgcctgtcccctaccgccttcctggagcgcttatccccttccagggagaggtggcccactttagagctctgaaacctgctctggtggggtgaagtgacttgagccaggccaagccggtggctgggccctctgtggcagactggaagtgtcctcccatttcatggatggccaagtcagtgcccagagaggggtagagacctgtccagggccacacagcccaggaggggcggagctcgactttgaacccaggctgcctggctccacagtctggattcttcttacccattcaacaaatacttaatgagcacacactgtctggcaggcactgttctaggtgctgaggatctagcagtgaccaggccaggtgcagaagtcttggcgtgtcacaggactagaccttcatcagaggccgttttgctgggagtgggaaggggtgtgtatttgggagggaggggcgcaagccatcacacctgcccatggccaggtaggcagggcctatgggagggtttcctggcagagggaacaccccctgcaaaggcctgaaggccagcagtgccagagagaactcagaggaggcaggtgcagggggtggggctggggaacccggtcagcactgggactaggactggacaggacgggctaggaccagtcacttggtttctgcaagagagaagcttggaggcaggatcttcattttagaaaggtcactggggaaggtgggaggttgggccaggaccctggggcctggcctgggcccatggataggaggccaggtactgaaatgatgcaatagtactaggctaggtgcagtggctcacacctgtaatcccggtgctttgggaggccgatgcgggaagattgcatgaggccagaagtttgagaccagcctgggcaacatagcgagaccctgtctctgcaaaaaataaaaaaattagccgggcatggtggtgtgtgcctgcagtcccagttacttgggaggctgaggtgggaagttcactagggtccgggagttcaaggctgcagtgaggtatgattgtgccactgcactccagactgggcaatataggaagatgccatctctaaaaaaaaaaaattagccaagcatggtgacatatacctgtagtcatagctactcaggaggccgagactgaggtttgcctgtaccctggagtttgaggctgcagtaagctgtgattgtgctgctgatgcagcctgggcacagagtgagatcctgcctctaaaataaataaggccgggcgcggtggctcatgcctgtaatcccagcactttgggctgctgaggcaggtggatcacctgaggccaggagttcgagaccagcctggccaaaatggcaaaaccccatctctactaaaaatacaaagaaattagccgggtgtggtgctgggcgcctgtaatcccagctacttggggggctgaggcaggagtaagctgagattgcgccactacactccagcctgggtgacaaagcaagactccatctcaaaaaaaaaaaaagttaataaactacttaattgtgcatctcctgtgtgccagccctactctatgctttggggatggaatgttggaggatcccaccttggggagctgtgtgtgagctccccacacagctcagatgggggtatggggtctgtatgtgagccagaacaaaatgcagctaagtgacatttagcatgtgttagttccacagagaaaaatgaggcatggggggtggaggtgggagaggtgtgaatgggggtgagagaagtctctgaggaaatgtcattcgagcggaatcactctgagcttggcaaggttaccctgtcttactgacgggaaacctagaccagagaggccaggaagcccgcccaggatcacacagcacagaggtggccaagcagggactggaatgcagggcagcctgggtgcacagagggcactgtagcagcagcaaagggagaggagaggagtaggtagatttcagtactctcagaatgcggatgggatcaacgaggaggaagtagatgacggaggctggaaagtcacttcctgctaagtggccagtgtcagtgttccaggcagagctgcttgggaggtggtttctggaaggctccaagtactcctgctgctgtgtcccagaaaacccttagggccaggcccctgctcaccaagctcctaggagacttctggggggctcatttcggaggcagtccaggccgagggtgaatgttggtgccctttgcatgcagcagtctgggaacttttagaagcaaaatcggataagtcccagggctcctggcgctctcagcctggcatgcgaggccctctgcgcctgccctgccctgtcctcaaactctcccctgagagctgcgtctccgtcgcccaggctgtgccctcctgtgcccgacttagaactgttcggaataacactcaaaattttaaggaaattaaacactcgaacaaaggatttttagcaaagcaattttacttctgtacagaggggtgcttgtccttggccagtcgccatgagagcacacctgaacaaagggacacgagagcctttattcctgatgcaagtcctgctcctgtaccctctccccattggccggggtcgggtcatacaatctaaaccaattttggttggctaaacatttgaatttttgtagataaggtgggcacgtaaaagagagaggaaaggggaagggatgtctgtagtgaactagaaagttagtcttctttgtaaataagggaaggaatgtgagctggtactggtaacgcctggtactgtggcgtgcctgggcatctaacaaagccagaaaggaaaaaggaaaaaagagtgtgtatgtgtgtgtggggtactatgaattaaaagattgatcagcctgtttgaagagaaacctcatcatattccacactacaaataccccaggcccagaaagtcaccttctcctgcctgtgcccacagctctgtgttctcttgggcgtcactcccgccctatgttctgaagctgtgattgtccgttgtctgagctgggcgctggtggcgtctggggcatcaccattgtcctcacagtgcctggcgcctcagacacaaagtggagtcacaggacagcacaggccacaggcaaacaccagaggtccaaagccgggccctggctgggagttactggagggtctgcctaagatgtgtttgctcagaaggccaggtgccctggtggttagacagctcaggccctgtgccttcagtccatgttcatgccacccccagatgctgtgtgaccctgggcaggcccccaccctctgggcctcatttgcatctgtaaaatggagccagcagacccattttaatggatcctgtcatggttaaatgggttaataggcaggtgcagtggggtcattgcagggagttcaagaccagcctggacaccatagtgagaccttgcctctacaagaaacttaaggtggcctggtgtggtggctcacgcctgtaatcccagcactttggactccattgcactccagcctgggtgacacagtgagactctgtctgttaaagaaacaaacaaacaaaaaaaccaaaaaacttaaggtggtggtgggtacctgtgatcccagctacttgggaggctgagacgggaggatcacttgagccctacagttggaggttgtagtgagctgtgaccttaccactgcactccagccagggcagcagagtgagaccctgtctctatttaaaaagaaatcaaaaaggttaataatcatgaaaagttctcaatgccttgcttggcatagagtcagtgttgaatagctattagctactctaatgttttgaactcagtaatgcgtgtgtatgatgcggaattcaaagatgtcggaaaacatgcagtggctccttccccaccaggccccagccgccccgggtcctgttttgtttccctttggttgtcttagtcacaaagtacagactttcttctgtaccttttccttccccttcccccctcccccttcccttcccccccccacttccctttccccttcccccttccctttcccttttccttctcttcttcctttccttttctttcttcagtaaaactgatcactacaaaccttttctttttttctcacttagtacaccaaaaagggagttacatgtctagaaaggacaggctctttttgtgtgtctgttgctgcatagcagcatggataggccataatttatatataaatacacgtattttattctattttaaaggtttttgttttgtttttttcccccgagacggagtttcgctctttgttgtgcaagctggtgcaatggcgcgatctcagctcattccaacctctgcctcctgggttcaagcgattctcctgtctcagcctcctgagtagctggcattaaaggcacccaccaccacgcctggctaatttttgtaattttagtagagatggggttgcaccatgttggccaagcaggtctcgaactcctgacctcaaacgatccacccacctcggcctctgaaagtgtttggattacaggcgtgagccattatgcccagcaatatatcttatatataaggtgattgaaaatatatgttttcaaaaagaaaacatattttcagtcagcttccttaggttgaacgtaatttatatttaactagtcccctgttgctgggctttaaaattctttgagatctgaatttttcgtcttattgagaaactaacagggttgtaacaattctgtgggcaaattttaatggaatgtccaccctgtacttttgtatctgaatcttcacgaacatgttctccttgacttgtgaccttttcctgagatttcagttagatatagttaatcgcttaagtctttttttttttttttgagacggagtctcactctgttgccaggctggagtgcagtggcgctatctcagctcactgcagcctccgcctcccaggttcaagcgattctgcctcagcctcctgagtagctgggactacaggcaccctccacctcgcctggctaattttttgtattttagtagagacggggttttaccgtgttggccaggatggtcttgatctgctgacctcataatctgcccgcctcagcctcccaaagtgctgggattataggcgtgacccactacaactggccaatcgcataaatcttaaacatataccttgattttcttgtcttcttcttcttcttttttggagacagtctccctctgttgcccaggctggagtgcaacggcgcaatcatggctcactgcagcctcagtctcctgggctcaagtaatcctcctgccacagcctcccgagtagctgacactacaggggaatgccaccatccgcagtgaattactttttactttttgtagagacaggggctcgttatgttgcccaggctggtctcgaactcctgacttcaagtgatccacccaccttggcctcccaaagtgctgggattacaggtgtgagccactgctgcaagttttgattttctaataaatgattgtaccttggtacctactggctagatcaagatgcaggacttcttcatggtctcagaaagtccctcctgccccttctagtccatttcccgaaagggaaccactgccctgatttctatctccagagactagctttgccggttcaagttcaagtccaccctgtgactcagcaagagaaacaaggacatgtgtctacaaaaagcgcatatgagaatgttcagaacagctttatttgtaataaattcaagctaggaagaccccaaatgtccatccaatggtgactagacgaacagactgtagtccatcagtgcaatggacagattcgaccacgaaaaggaatgaacgtcagacacacgaagcagacaggatgtctgtgattgcatcacatgctgctcctgtgttgttttatcgttgacatcttccacttgcacacttcaaaaatagtcattgaaaggatggagcaggggcactgttgtgaggggcacgtgctgtcaccgccgctgctggtgattcagtgtctagccagcgccgcatggtttctgagatgctgcatttgtcttttttttttttttgagacagagtcgttctgtcacccaggctggagtgcagtggcgcgatctcagctcactgcaacctctgccttccaagttcaagcggttctcctgcctcagcctcccaagtggttgcgattacaggtgtccaccaccacacccggccagggtttttttttgtctttttttttttgtattttgtattgtttttgtttttgttttgagatggagtctcactctgtcacccaggctggagtgcagtgatgcgatctcggctcactacaatctccgcctcccgggttcaagccattctcgtgtcttagcctcccgagtggctgggattacatgcttgcgcccccacacccggttaatttttgtatcttaagtaaaggcggggtttcaccatgttggccaggctggtctcaaactcctgacctcaggtgacccacccaccttggcttcccaaagtgctgggattataggcgtgagccactgtgcctgacctgagacactgcgtctctgatgtgcaagatgccaagtgtccctgcccctcaggtccctacctgtgagctaggtggcctggggctctggtagggccagggccaaggctacttgtggcgttcatgaggttaataccctgggacagcctggtgtccactgtgactactgtgacggaaagacaaggggccatgctaagaggtgactttggggtctgtcacctgcatgggggcgcccgctcgctgtttccctcgttcagttcactccgcctcccaattgatgtagcttgttccctcagtccccctgctcagagaaccctctccaattatcccagcccccaacccctctcacccctgcagtatgtcttcctcgcacccacccccgtcagaatgttggcgccagtgtcaccagcacctccccaagtgctcaggagccagtgagaaaggttcgctccttttcatgcaagccatgagctgtgatgttgtccaagtctcgtatcctgtttgtgcctcaggctcctcatcagccgaatgggaggctgacggaaagggattagagctcaggcatcagcttgaactggggcacgtggcgtgacaggcctagtgcctggcaggcaggtccctcgggctctttgtcatcctcaggagtgtggctcgaagacaggtagcatcccaggcctggagagctgactgtgctgcctgtggctgcagagacaggatgcagaggccagggctcgtcccccagagccttgcaagtgtctgtagggcgctcccctctgtcttgcctcctcccactctctggctcttctctatccggcctgccctcaggttgtgaccatccacctcccaaactgccctggaatctgcctacggcctgtccactggcctccgtacccctgcctgccatctctctggtttcgcccctgatgtcactcacatgaaccacagcggtcacccccacctgcctcctgctcctgccctctcctctgccctgcatcagccagaggggggtttaaaagcttacatttgttaataatctggctaaagcttaacatttattgtaatccatccctaaatcccagctggtggcattgctctaacagtgatgaccagcctcctcatcataatccccagcactgccaccctcaaccccccagcgctgaccactggaggctgcttctaaaacttcagccctgctctgccagcagcgcccctggggggtcttcgtagccctgttgcccatcacgatcccttttctcatgcagtccaggctgcaagcccccgccgagggcttgggctgacttgttgtgtagtcagtgctgtgtctctgcacccagccagaagtggtgggacagccccccggctgacgggctagaacccatcatccagggtgtgtggaaagagcacatctcccccccgacgccagccactgggtaatacattcccaggaatttccagtgcccagccccagctgagaaacaggtcttctggaaccctccagcaccctcatcaggggttcccagcatgggtagggccacctgccagctgggaatgattgtagtgctagtgacactcactcagggacccaggatgctgtctcgttctgtacagggcacagctgtacagtaccaattgccctgtgtcctgtacaaattttcaacgatccaaacatctaggtgcaaaacctgtttgaaattctctgtgttggccaggcacggtggctcacacctgtaaacccagcactttgggaggccaaggcgggcagatcacctgaggttgagttcgagaccactctggccaacatagtgaaaccctgtctctactaaaaatacaaaaaaattagccaggcatggtagcgcgtgcatgtaatcccagctactcaggaggctgaggcaggagaatcgcttgaacccgaggcagaggttgcagtgagttgagatcgagccactgcactccagcctgggcaacaagagcgaagctctgtctcaaaaaaaaaaaaaaaaaaaaaagaaaaagaaattccctgtgcctagaacctttcaccattttgtatgaaacaacagaatttcctttcgagcctttaatgtaccccgagcccactgtttctacttcagtcctcactggaaagctttcattttcctttctgagtgtacagggtgacttcctgtcttcctccttgctggaatcctggtgtattcactgtaagtcggagcaggctactccctctatcttctggggtggttgtgcctgagtcttttccattgtgaaagacatggaattgattcctttcttccttccctccttccttccctccttccttccctccctccttccttccctccctccttccctccctccttccttccctccctccttccttccctccttccttccctccctccttccttccctccctccttccctccctccttccttccctccttccttccctccttccttccctccctccttccctccctccctccttccttccctccctccttccttccctccctccttccttccctccctccttccttccttcctccctttcctccctttcctcccttccctcccctccctcccttccctcccttcccttctttccttgatggagtcttgctctgtcgcccaggctggagtgcagtggcacgatctcagctcactgcaacctccgcctcctgggttcaagcgattctcctgcctcagcctcctgagtagctgggattacaggcgtgtgccaccacacttggataatttttgtatttttagtagagacggggtttcgccatgttggccaggctggtctcaaactcctgacctcaagtgatccgcccacctcggcctccccaaagtgctgaggttacaggcctgtgccactgcacccggccaggatatgtacttttcttaaacagctctgtcgaatagtaatttacattccgcgaaatcgatccatttcagaattagtggtctttagtcattttacagtccttttttttttcccacacagagtctcgctctattgcctaagctggagtgcagtagtgcagtcatggctctgtacaacctcagcctcccgggctcatgccatcctcctctctcagcctctctagtagctgggatcacaggcgtgggccaccacgcccagctaattttagtttagtttagtttagtttagtttttgtagagatggggtcttactatcttgtccaggcttttacagttaattttagtaaacatcaccatagtccagatgtagaacattttcatcaccccagaaagctccttcccctccattggcagtcacccccgttcccacatccaggtatccactgatctgccttctgcttctgtagatgtgacttttctggacatgaaacacatcctattttgtcatcaataactttcctcgtattttacccatatacatgtggcattgtgttgatttaaaacacataggaaatgtgttgatctcctgggtatgggggaaatttaacaaatacatgccagggaatgggccccctgggagtacggggggtggggcacagcctgccagagggaaatggttctggtcactatgaccttccatgcataccttcctgagctcttcaggcctcaggaccctccaagaccagagcattccccagggcccagctggggttggtgcctttgctgaggtcgcccaaattgcaagacagagttgctccaccacatgtggtcacacttcctgcccctcgatccggacgcaagagtaatttctgtccctctccccccctcacagggacttccttccccgcggttcaggaatcgtcacccggcggcctctcattctgcagctcatcttctcaaaaacaggtaaaatggggcggcctgaggttcagcaggaagtggatgtggatgtgtggttgccaggagttgctgggggcggagggtggaacttgggtcctgggctgtcattggacattgaattcacgtgttccacatgtgtgaggaaattgaaaaacggctcagtgaacacttacacacccacactgcaagccctcagctgtgaccagaatgccaggtgccatgtgtgctttcttttttcttttttttgagacagagtctcactctgtcacccaggctggagtacagtgatgctatcttggctcactgcaacctccacctcccaggttccagcgattctcctgcctcagcctcccaagtagctgggattacaggtgtgaccctccatggccagctttttttttttttttgtatttttagtagagacagggtttcaccctgttggccaggctggtcttgaactcctgacctcaagtgaccctctcacttcggcctccctaagtgctgggattacgggcatgagccaccacaccggccccatgtgtgcttttcatgtgttatagataacccgattttgctgaacgctttcaaagtcagtagcagacgtggtgacacatccatccttcacgccccagtgcacctccccatgcaataaagacgcctgtctacaaagtcccagcaccatgccccagagaacgagtcattcccgcatgtcatccacgtcccagtttctactcagcatgtcgccagttgtcccccagatatctggctggttttatagctgctctgctcaatccaatgctatactcttttgtaatctcttcttctcttttcattaaagcagcctccccataatcactttttttattttttttaagagacagggtctcactctgttccccaggccgtgcagtggtgtagtcatagctcactgcggcctcgacctcctgggcccaagcaatcctctccaatcagcctctcgggtagctaggattacaggtgcacacaccaccacacccagctgatttttttttttttttttggtagagatgggggttatgttacccaggcaggtcttgaagtcctggcctcaagcaatcctcctgcgtcagcttcccacagtgctgggattataggcatgaaccatcacaccagccctctaccattgctttttattttttattttatttatttatttattttttgagacaaagtcttgctctgtcgccaggctggaatgcagtggcgtgatctcggctcactgcaacatccgcctcctgggttcaagcgattctccttcctcagcctcctgagttgctgggactacaggtgtgtgtcaccatgtctggctaatttttgtatttttagtagagatgggatttcaccatgttggccaggctggtcttgatctcttgacctcgtgatccgcccacttcggcctcccaaagtgttgggattacaggcgtgagccaccgcgcccggccaccattgctttttaatcagactttgactcttagggagacccagcctgttgaatatagtatggcctatgtgtggattttttcctgttctttccttccctgatctcagtgtatttctattcttcccacccgaggctgacatgaggtgggcgtatatcccagctggaaaccccctcgggcctccttgggaaggatcttgggtcagaagctagacccgggagaggtaagggtctccgtgccccttccctgctaatctgcaacatcagctctgggcgttcaacactcagtttgtgttaatgtcttcttgcggcccttttaaatactctcacactgggaaggcagctgacacacacacccccattctacagatggggaaactgaggcttagccatgctgcctgcctttccaatgggccccagatctgggacctgcatccaggcagatctgacctcaacgccagctctcagcttggcctcccaagactcctcactttcgtcctctggccccgcccaacctggcaagaaggcgtgtctccagtgagagacagcagccgatgggcccaccacctcttctttatgagctctgctatttcgtacgccaccgatgggccaatgggctgccacctctgggttcaggcgtccaatcagctgtgccaggaatgggcagccccaaagtcctgagagtcactatagaaatcagtgttggtagttttctgtttctcattgagcaggatggggacagatgtgcaaactgcatttttattttattttattttgagacggagtctcactctgccacccaagctggagtacagtggcgggtgatcttggctcactgccacctccgccttccaagttcaagcaattctcatgcctcagcctcctgagcatctacaggcatgagctaccacgcccggctaattttttgtgtttttagtagagacagagcttcaccatgttggccaggctggtctggaactcctgagctcaaatgatctgcccgcctctgcctcccaaagtgctgggattacaggcgtgagccactgggcccggccacaaactgcatttttaatgagtccctggtgatgctgccagtctctggccacaccactgggagagcctgccctgcttggtttaggcttggagcggagactgcccaggttcccaacccagctcctagggagggaccaccactgtgtttcctgtctggacagtgatgacaataacaccaccttgttagccttaaagcacacgttatttactacatgtcagggaggaggggagagaagcaggcagagagccttggccaggagggagcacagagcgcaggcctacccagtacctgacccggatgaacgatgatgggttcctgatgtctgtccccaccttacagaggagggagccaaggcttcctgaccacttgccttagggcacatgggaacattgtctttaaagcccacccttaagccacctcttgggggaatgtggccttaggccaaggtgtgacttgaccagatcctgtggctgttggtggaaaagggaccacaggggccagtgctgaggccagtgccctggaggaggcaggagtaggtgctggaaggggtgggggcaggtgggggatgggtgtggcagctgtggtggaggtggatgcatagttgcatcctgttgggctggttgaaaagggagttccagaagtgtcccacatgggtggggccttttcctgcctcccagcttgcacccctcagccccgcctgatcatggcattttcagtctctgtctccttttttgttttgttttgttttgttttgtttgagacaaggttctgctctgtggcccaggctagggtgcagtggcacgatctcggctcactgcaacctccacctcccaggttcaagcaattcttctgcctcagcctcccaaatagctgggactataggcgcacaccacctagcctggctaatttttgtatttttagtagagacggggttttaccatattggccaggctggtcttgaactcctggcctcaagtgatctgcccaccttggcctcccaaagggctgagattgcaggtatgagctaccgcgcctggcaaatttttaaattgagatgaagtcttgctatattgaccaggctggtcttgaactcctgggctcaagcaatcctcccatctcagcttcccaaaatgctgggatgacaggggtgagcccctgcgcccgaccaggctccaatctcttattgctccaagtaggtgcccacttggtgctgggccttagctgatctccagggaggcagcgtgagcacctggcatggtcccagcccccgagcccagcctgtgagtgtctgttggattcaccttggggttgggggcccagagagaacattctaggtagggaaacagcattagcaaagcagtgtggggaggtggtgaggcttgggaggggccagaaggcaggagggactgggactggaaggcatgttgaggattcaggcagtgggagctggggtggcatgcatggtggcgggagaccactggctgccatgttcaggagggacagtcagggaccagaatgcaagcggggagtgggggatagggagtggcagagaggctggcatggcgccaggcaagaggcaatgggggcctggccctggtggtgcgggcagatgccaggcagtctagactgtcttccaggcaaggcattaagcagcataggcacccttgctgggggaggtgggtgggaggtaggacgccttactaagaggagaggaaaatgaacacattgcgggcatcagtgattgctggggccggcggggccttgtggggtatacaccagaccacgtggctcctagggattggcagctggctctctgtgaccaaactcagaaccaggctgccaccctttactggcccgggacttgttaaagtgacttccctctctgtgccttggtagcttcatctgtaaaatgggggtgatggtggcgctgccatcgtggccatggcaccccattggctgtggtatgctgtctcttcctgtggggtctgatgtccaaagacagggcccccagggcgcagcccacgttcccctctggttcccgcagcttgccctcattccagccatccccagtgaaccataacttccagccatagaagtttaaacattacctaagaccataaccaccaggaagtttggtggcccatgagtgaaccctgccctcactgggaagcagccccgtaaactctgagtgcctgggactgttcctgtgtggaatgtgcacagtgaggccctgtgaaccacccctccccaccgcccttggccttgaactggcctttggtgtgctcaccggaaccaaggaagagatgtcaggacctggctccagggcttcccattggcctcagaatcaaatcgagcctccttctcaaggccttgtggcccttgccagtctctgggacctcacctcctcctggtccccagccactgcccccatccatctccctcctgattctcaggcccagcttgctggttcccactgcttggcctctgtgctcactgtgctgcctgcctggaacgccctgttccctacctgccactgtctgctgctcacccgcacctggtcacttgccgccttcgttccccggtccccggcagcacgagttatcctgttcttgttttttctttttcttttttttttttttttgagatggagtctcgctgtcgcccaggctggagtgcagtggcgccatctcagctcactgcaagctccgcctcccgggttcacaccatgctcctgtctcagcctccggcgtagctgggactacaggcgcccgccacctcgcccggctaatttttttgtatgcttagtagagacggggtttcaccgtgttagccaggatggtctcgatctcctgacctcgtgatccgcccacctcggcctcccaaagtgctgggattacaggcgtgagccaccacgcccggcctgttttttcttaatggactctctctgcgccagcacacgagaacaggcatgcagatcggctctgcccagcacagggcctggcgccgagcaggtgctccgcatgcacggccgagtgaacgagctcaaagggctggtgctgtgccccttcttgcctactgggcgggaagtgatgggggttactttaccaagcatcttcccctggtgagcctggtccatcactctgccattccatctgcagccttgtatctagagagcagaccaagctggcgtgcgtcaggctgtgggctggctgggatgcctgcccaggctgacaccttcccagtggcaatttgtcctggactgggagatatttgcgtattgcctcggattagagagaactcaagggctaaatgggcatgggaagtgttgtgtgctgtgcccacttcttggtctgctgaaggctctcaaaagtcctgcatgagtggatcctgcctgctggcgtggtagctagggtctcctgatggtggcagatccccaagttgttccccctggtcctgcctgccaacagcaggtttgggaaaggcagatctcctctccttgccttcagggccagcctcgtcattgtgttctttgctgggggaacggtgagaagatccagggcagagccccagtgtgcaaagcactgggaccctagcccagcccctgagggttccctgagactaacagctgagccgtgtttgtgctcctgatgggatttgatcgcagtcatatgggagccccggcactgggttctgtgtcattgcattttggggaaactgaggtgctgagagaagggtaggaacccggagctgggtgtcgctaggctgtgaaaccacgaggcaccccgaaaactctcctccctctctccctctcctcacctccccaaaccctgctgtcttttctgttgggctgaaggcaggtcttcccagcaggacctgggcatttcaaaattcttaagtagtgccagcgggcacgtgaccagtgtgctttgaagatagggagggccattctctgaccaagggccttcggtcactctggggctccacaagctcctttgaaacaggaggctccgaagacctccagggtctccaggccagaggtgactgtggcctctggcaaggggctgcttcttcatgtcccaggccccctgaccctgagaaggtggcagcttgcacctgtggctcccttctggggacacctcaaagggcctgaggtgcaggggattgactgtttagcacagtggggccccagttgggggttcctgggagtgatgtcctcctaggttagagcacagattcttttttcatggattttaattaagcagctgctgtatacgagatgctagggggaactgtgatcacaccaagtctctgctctctcagagctccagcttcagtaggggacacaggcttgggagggaggcagaacctctctctggaaaaacccgcaagtacaaccagtgggcccacagttaggaggccctgtggtgggcgaggacggctgactccctggccttggcagcgtgattgctggatgactgcccagattaatcctttactcctgctgtgtgccaggctgggtccctcagagtccccagggcctgatcacatgccagctgcgaacctctctgagggggcccgggctgaccctcctcccagggagccctcctggctcagggtgccgggtgacagtgggggtgtgtgtggagctatcaaaatgctttgcagtttgccgaggaattacaggaactggctttggtatctggaaatgcctgtctgcagagggtggctgtggggtgcagcttgatggcagggaccgggacaggcagagccaggggtggctcagtggcttgttggctgggcctcggctgctgctgctgtggacaagttgacagggaactcagtgttaaggcctctggctgattctttgggccagtggattgttaaaaaaaaaaaaaaaatcatctcatctccagcacttgagcgcatgcagcgttccagaggcccaggctaggccctccactctatttctctttttgtcattgttttgagacagggtctctggcctccccttgtcatccaggctggagtgcagtggcgtgatcacagctcactgcagcttcaacctcccaggctcaagcagtcctcccacctcagccacccgtgtagctggaactacaggcttgcgccaccacgcccagctaatttttaatttttttgtacatgtaggatcttgctatgttgcccaggctggcctccaatgattctcccacttcagcctcccaaagtgctggagttacaggcatgggccactgctctcggcctggtggaagcttttaaacctctattgggctgggcatgatggctcatgcctgtaatcccagcactttgggaggccgaggtgggcggatcacctgaggtctggagttcgagaccagcctggctaacatggtgaaacctcatctttactaaaaatatacaaattagccaggcgtggtggcatgcgcctataatcccagttacttgggaggccgaagtatgagaatagcttgaaccggggaggcagaggttgcagtgagccgagatttcactactgcactccagcctgggtgacagagcaagactcagtctcaaaacaaacaaacaaaaaacctctgttgacctggcattcagcatttactttcaccatgccagggagccctgtgaagaaaggcaggcagctgcggcagacctggtcggtgcctgggcctttttctctggtgtggttctgttgctcactgacccactagggaagaaacggttttctggcacctgctgtccatatccttcgcccacatggaggggttggccgacagcagaaggatcttggaggagagatcacaaagaacagcccctgctggccgggcgcggtggctcacacctgtaatcccagcactttgggaggccgaggcgggtagatcacgaggtcaggagatcgcgatcatcctggctaacacggtgaaaccatgtctccactaaaaatacaaaaaaattagctgggcgtggtggcgggcgcctgtcgtcccagctacttaggaggctaaggtaggagaatggcatgaacccaggaggcagagtttgcagtgagccgagattgcactactacactccagcctgggtgacagagcgagacttcgtctcaaaaaaaacaacaacaacaaaaaaaaacagcccctgtcttctctgatcccctgttggttcccagcctgcatgtgacaaccggggaaggtgccgtgctccaaagtctggcatgtgagtctggctgcctggttccagccccatctcgtgtctgcccctgactgggcggacttgggtggggcaggtggtccttcctgggcccgtttcctggtccttgcgttggggaatggcctgaggttccgggggaaccttttgcagctcagacacctagattcagcttgctggggaagcctgtggcagccgggcaggcagaacctccatttctcacctaacatgcgtgagtgtgcccttggggacacagcaatgaccaaggcagatgggcgtcccttccctggtggcatggacattcaaggtaaagctctctatattagatttcttctcaccctttgtcagatggtagtaagtgttatggggaaacgaaggcaggggaggagggggctgggtggagcagctgctgtggggagagagatctgcaggaggtggggatgctgtgtgacttgagagagtagcttgccctctctgggctcctgcctgtgtgtgctgggggaacgatggcgcccactgcccctggtgctgtctttgccacatcattccttggggacttctgcccaccagctgctcagaccgtagctgtgctggctatgctcttcctgtgcaggtattgactctgagtcctcatacagcctgttatgatgcgcattttacagatcagtagactgagacctgggcaggccctctgactacagactgagctcattactgcacacagcgtgctgccagtacatgctgggctctggggtgctggagccgcaggtcctggccccatcaatacaatccaaagtgagctggctctgatgaggaagaggccaagatgccccactcagggaagtcttcctgggagaggtggtagccaggcagacctgggagtaggaggaggtagggctgggctttgtagacaccacacttggtgggacagaggcctgctagggagagggcctgtgtccttgccaccagcccatcttccacgccatgtccccctgcactctttgaagggagatggtctcttttggggctaagctggggtcctggagccagaagagaactgagatttgctgtggggggttgggagctgttccatttttagtggctgctacaggaagagcggccgagtgtttccccttgtccctgcagaaggctggagtgtaactgtccttgggaactgggtcagctgatagcagggctgggggtgggggtggggatcctgaatcctccagcagatgtcctcattgccctgatctgggtggccagtgcctgtgctggacacggtcctcagtcatcggagcccactgagtctccccctgaccctgcagagaatttcaaagaggcgaagttccttccagtggcctcacaaaggctatctggcttaggagccattacctgaagccagaatttctgagttccaagtcccagctccatcacggaacttggcccaaggcccttaacccctctgggcctcagttttgtcatctttgaaatggggatcttagagatgcctacctgtcaagggacttgtgaggcgcaacgggaccacacgcagggcctggccagagtgccgtagtttcttcggttgccatgatgggacggtgaaactcctcacactcttctttctgccttgaagattctagacctggctgggtgttcatctccctttttgcctttgcttgaggcagtttatggcatggctgtgttattcacgtcgccaggtctcctcctggtggacgttgaggccattttcatttttttactcttaaaaacgacagggcagtgcgcatcttcgcatctccggggtgggtcaggtctctgacctctttgccagtgtgacttattacccctttctttctttgtttttctttttgagacagtgtcttgctctgtcgccaggctggaatgcagtggtgtgatcatagatcatagctcactgcaacctccagctcctggctcaaatgatcctcccacttcagccgatattaatccattttcatgctgctgataaagacgtatttgagaccgggcaatttacaaaagaaagaggtttaatggagttacagttccacacagctgggctggggaagccccacaatcatggcagaaggcaaggaggagcaagtcacatcttatacggatggcagctggcaaagagagtgagagagcttctgcagggaaactcctgtttttaaaaccatcagatctcgtgagacttattctctatcacgagaatagcacgggaaagacccacccccatgattcattgatctcccactgggtccctgctacaacacaagggaattatgggagctacaagatgagatttgggtggggacacagagccagaccatatcagcctcccaagtagctggaactacaggtgtgcgccaacatgcctggctaattttttaaatttctgtagagacggggtctcactgtgtcacccaggccggtcttgaactcctgggctcaagtgatccaccctcctcggcgtcccacagtgctggataataggcgtgagccactgtgcccagccatttcccccttatttttagcatcactacagtagctgtgatctctgagctttggggatatcccctccccaacattttactctgaaaattcgaacatctggaaacgtcaaggctttgtacagtggacacctgtgtactcggcagccaccttccgtgatgaacatgccttatatttgctttgtcctcaatctgtgattcgggactggatttctcttgtttcctggtgggacccacactgcttgtcaattacttattttgttccccttcatcccagtcttgctgtgactttcagatacccccgggtcttatatacactcagggttatacccagaaaacatttctcctgggggatttgtctctaggtagggggccctcttgaatagtcagggggagaaagaaagactcaagaccagctctgaggaggcggcaggggtgccccttccctctaccttgtgggctccttggggaagaaggacaagtgagtgccatgagaaatacccctggggattttgtggagctggaatgtgctggtggaccatgaatccacaaggacttgggcatcgaactcccttgactgggacccacagcaagggaggctctgcagcatcaccttaatcaaatggactcaccctctctgggtgatgtatcctggtgcttcctcttctgttcatcagtcaatcaacaaataaatggctgggcgtggaggcatatgcctgtaatcccagaaactttggtcattggttatgtctacctgtttatttttgggggagggggattcataatatgtcatgacgtatattaacagtttgcaaagtgccacatgggaacgtaatcttcaggatctggaaagaggctcagtctattcagtctataggaacccccgcctcccccaagacccttgtcatgagaacgaatctttcactcccaaattcctagagtgacgatgattgggtcattattttcttttttattttattttattttattttatttatttttttatttttttgagatggagtcttctctgtctcccaggctagagtgcagtggcgcaatctcggctcactacaacctccgcctcccgggttcaagcaattatcctgcctcagcctcctgagtagctgagactacaggcatgtgccaccatgccaggctaattttttgtatttttagtagagacagggtttcaccatgttagtgaggatggtctgaatctcctgaccttgtgatctgcccacctctgcctcccaaagtgctgggattacaggcgtgagctactgtgcccagcctgggtcattactttcattcaacaaagcatttctccccgcagtccatgcgcaccctgcccacagctctttctcattttcagcatctctcttccctttctagaacatgccgagtttttgcactgcaagtccaaaaagtttacagactttgatgaagtccggcaggagattgaagcagagaccgacagggtcacggggaccaacaaaggcatctccccagtgcccatcaaccttcgagtctactcgccacacggtaggcagcacgggtggggacccatcactgaccgtttctggtcgttcatggacagtgctatgggtgagcctgtgtacttccactcatgggtatcatgtgcccattcacaaacagttgatattcacacacacatagccccttgatctgtatcttcccacttgtgctaggtatgtagtacccagacctctgtctcagcttgaagaaagagcatgccaagaagttgtttggagtggtgggggattgcagccatttcccccttttaccaagggcagccaccacttggctcaaggcagccagatctgctggtgcctcaagagaggccagaaccagtcttctgtaaaatatcctgggttttttttttttttttttgagacagagtcttgctctgttgcccagtctggggttcagtggtgtgatctctgctcgctgcaacctccacctcccaggttcaagcaattattgtgcctcagccgcccaagtagctgggattacaggcatgcaccactacacccagctaatttttttttttttttttttgagatggagtctcgctctgtcgcccagactggagtacagtggtgtgatctcagctcactgcagtctccgcctcccaggttcaagctattctcctgcctcagcctcccaagtagctaggactagaggcaactgccgccacgcctggcaaattttttgtatttttagtagagatgggatttcaccatattggccaggcttgtctcaaactcccgaccttgtgatctgcccactttggcctcccaaaatgctgggattacagacgtgagccgccgcgcccggccaaatttttttttttttttttgagacagagtctcgctctgttgcccaggctggagtgtagtggcgcaatctccactcaatgcaaccttcacctcccgggttcaagcaattctctggcctcagcctcccgagtagctgggattacaggtgtgtaccaccctgcctggctaattttttttttattttttattttttttatttttagtagagacggggtttcaccatgttgcacaggctggtctcgaactcctgagctcaggcaatccacccacctcagactcccaaagtgctaggattacaggcgtgagccaccacgcccagcccattcagctacttttttgtatttttagtagagatggggtttcaccatgttggccaggctggtctcgaactcctaacctcaggtgatcgcctgcatccccctcccaaagtgctgggattacaggttttagccaccttgcccagccaaatatcctgattttaaaactctgcattcaaacagcagcccggggccatagacatcctctggcccagaggcacagattgctaccatgatgggttccttgcgataagttttaaatttgtttttcaataaatgacacctgcatgtggctcagaattcaaaaattacagaaaggtatatcgcaaaaacctaccttgtcaaccagttttgcacacatattttaggttcttcagatgacaatgcaaacatgagctgggtgtggtttcacacacctgtcattcaagctgcctgaaaggctgagtcaggagggtcacttgggcccaggaagtcgaggttgcagtgagctatgatcacatctgtgaatagctactgcacttcacctgggtaacatagcaagaccctctatcttaaaaaaaatgtgtaagcaaaaaacatgtaagcaattgtgattgtatctatgtatatgttgtgtatgtgtttatcactccttttccttaaattgttagcataacataaaaatcacttatgctttttttgagatggagtttcactcttattgcccaggctggagtgcaatggtgcaatcttggcttaccgcaacctccacctcccgggttcaagtgattctcctgcctcagccccctgagtagctgggattacaggcatgcgccacctcacccggctaattttgtatttttagtagagacggggtttgtccgtgttggtcaggctggtctcgaactcccgacctcaggtgatcgcctgccttggcctcccaaagtgctggcattacaggtgtgagccactgcgttggcctatgctttttttttttttttgtatgcctctcagaatgtttctttattatatatttatttttttttttttttgagacagggtttaacactgttggccaagctggagtacagtggtgagatcttggctcacttcttctcctgggctcaggcgatcctcccgccttagtctcctgagtagttaggacaacagatgcacaccatcatgccaggctaattttttatatttttggtagaggtagggtttcgccatcttgcccaggctggtttcgaactcctgagctcaagtgatctacccatcatggcctcccaaagtgctgggatgacaggcatgagtcaccgcgcctggcctcatccatttgtcttttgtttttgtttttttgagacagtcttgctctgtcgcccaggctggagtgcagtggtatgatctcagctcactgcaacctccaccttctgggttcaagtgtttctcatgcctcagcctccagagtagctgggagtacaagtgtgtgctaccacgcccagctaatttttgtatacttagtacagatggggttttgccatgttggctaggctggtctagaactcctggcctcaagtgatccacccacctcggcctcccaaagtgctgggattgcagatgtgagccaccgcacccagcctcatctgtttgtctgtaatggttctttggtattggctgaatggatgggctgaaatttattcagtcatttaggtctattccagtctgaactgtcctgatttagaactgtgccattgaaatggagtaggtagaaggtatctgtaggatgggatcctagaaggggagttactggatcaaaggtgtggttcaggcagagtgtcaggcgacatcctcaagtctgagccccgcgcaggaactttggtagtcagctgggtggctgcgggcctgtttgtgcctcccctctcctggctctgaatgcctttccttctggtttccctcccagtgttgaacttgaccctcatcgacctcccgggtatcaccaaggtgcctgtgggcgaccagcctccagacatcgagtaccagatcaaggacatgatcctgcagttcatcagccgggagagcagcctcattctggctgtcacgcccgccaacatggacctggccaactccgacgccctcaagctggccaaggaagtcgatccccaaggtaaccctgagcctagggcagtcccctcttccaggtgcctctgagcatgggatgtgcccagcatccttggttccaagtcactggcgttctctttaatccatggccgctgtaggaaaaggcctcctggaacatggcacttcctccgagaaccagcagtgctggtgggcatcccctgggaagtcactgtgtggcagttggacggtcctccttggacatggcagtgcccatgttgccagagtgggaagctagcctagggctgaaggaagggcccagcgctccatcgcccagatgcgatcttaggtcccatctagctgttactctgctccctgagacatggtcccctcttagtcagaacgggaacttcagtcctaacccagatagctgatgtgaggactgttgaacttttgggttgtttctgatctttgcatggtgagatcgtctatttcccttcgagttgacacccctgggcccctctagtcagatccttctactgaaccctcactgcagaatgtgagcaggaaggggccccagggagggcacagctgtggcccccttgatgcccaaattggcacccaccagagatcttcactctggcttccatctgtccccagtgtctcatgcacatgccacacatataacacacacggttagcacagagccaggccctcagcccccgtgggagcagttgatctgcagaggtgagactttgctagaaagacatccttgactctggaatgacttgtggagaggtggaattggatgggatggtttccagagtggaattttagccattcaggcaagaggtagtcctggaaacagtcgtgtcaaactcaaatgttcccttgggactttgccggcacttggaaagtccagcatcaaaatctggcccaggaatcatgtttacgtgaggtttcccaaagcctgcagcagcagaggttgtccttaataacacaaatgacaataacggccagcatttgttgagtatttgccgtgtgccaggctcacccttatgaccaccctgtgagatcagggctgtgaccatcttcattcgacatgtcggaaactggggtccaggcctgtgacgttctggctttcccaggtgatgtgacctggaagtttcagggccaactggaccccaggtggcttgcagctgccagctgatgctctttcctggtggcagcctctgacctctgacctctgggctctttcaggcctacggaccatcggtgtcatcaccaagcttgacctgatggacgagggcaccgacgccagggacgtcttggagaacaagttgctcccgttgagaagaggtgtggctttgggggtgctggggaagcaggaggatgggtggggtccttatcattactgaaaccccagcacctgttccctgcctgcctggaagtcattgcttctccatttcaccgtaactccttctttcttttccctttgagctatgtatctttttcttctgatttgtatgcattcgtttttcaagtgcacaattaacacctgctggtttctgaaacattagaaaacaagtgtatagaaagaggaaactaaactcacccgcagccacacttcccccagacagccactggtgaatctgcagctcccagctccccagggtttataactttaattaatttttttattactttctattatgagccttcccttcccttttccttttcctttttgttttttgagacggagtttttgctcttgtcacccaagctatagtacagtggcacaatctcagctcactgcaacctccgcctcccaggttcaactgattctcctgccccagcttcctgagtagctgggattacaagtgggcaccaccacgcccagctagtttttgtatttttactagagacggggtttcactgtgttggccaagctggtctcaaactcctgacttcaggtgatccacttgccttggcctcccaaagtgctgggattacagccatgagccaccgcacccggcctattatgagcattttcaaacattcccaaaagtgtggaaaaaagttcaaagaatcctcgtggatggcttccccagcttcggtggttattattattattttcttcctggaatattttattttttcattttatttatttatttatttatttatttatttatttatgagacggagtctctgttgcccaggctggagtgcaatggtgcagtctgggctcactgcaacctccacctcccaggttcatgccattctcctgcctcagcctcccgagtagctgggattacaggtgccagccaccacgcgtggctaatttttgtatttttaattgagacagggtttcaccatgttggccaggctggtctcgaactgctgacctcgtgatccacccgcctcggcctcccaaagtgctgggattacaggtgtgagccaccgcacccggccatcttcctggaagattttaacacaaatcctaggcactggctgggcgaggtggctcacgcctgtaatctcagtgctttgggaggctgaggcaggaggatgccttgaggctgggagttcaagactagcctgggcaacatatcaagtccctgtctctactaaagattaaaaagttagctgggcatggtggcatacacctatagtcccacctacttaagaggctgaggtgggaagattgcttgagcccaggagttcgaagctgcagtgagctatgatcacactactacactctagcctgcacaacagagcaagatcttgcctctaaaaaaaaaaaaattctataaatcctaggcattgtagcattttacacataaatacccacatttcttttcaaatacttccccttgccatcccatttgtttttttctataccattcatttgtggaagaaaccagaccacatcccacatttgggatttggccaattattgttctctgttagctggtaattagatcaggttcaggttcaagttcaggtacagatcttctgataggagtaacctaagtattttttattttattttaaaaatattttaaatattttgggtcgggcatggtgactcacacctgtaatcccagcactttgggaggccaaggcaggcggatcacaaggtcaggagatcaagaccatccttgctaacacagtgaaatgttgtctgtactaaaaatacaaaaaattagccaggcgtggtggcacacacttgtagtcccagctactcgggaggctgaggcaggagaatcgcttgaacccaggaggtggaggttgcagcgagctgagatggcgccacttcactccagcctgggccacagagcaagggtctgtctcaaaaaaaaaaaaaaagaaaaatttttcaagcattttattttatcggagcagcagttttaggttcatagccaaactgagagggagatacagagatttcctatcagccctatagcccacacatctgtaacctctcccactttcaacgtgcccagcagagcggtgcatttgctagaactgatgagcctgcgttgacccattgtcaccaccccaccccacatccatggttgacatcagggttcactcttgctgttataagtttttttctttctttctttctttctttctttctttttttttttttttttttttttttgacgatgtcttattctgtcacctaggctggagtgcactgggacaatcatagctcactgtagccttaaactcccaggctcaagtgatcctccgagctcagcctcccaagtatttgggattacaggcatgtgcgattgctcctggctaggttttattttgttttgttttatttttttcagacagagtttcattcttgttgcccaggctggagtgcaggggcacaatctcagctgactgcaacctctgcctcctgagtagctgggattacaggcactcgccaccacacacagctgatttttgtgtttttagtagagatggggtttcaccatgttggctaggctggtcttgaactcctgacctcatgtgatccacccgcctcagcctcccaaaatgctgggattaaaggcatgagccaccgtgcccagccttcttttgtgtttttttaaagccattcctcccctctggcatctactctaagctgcgggcacctcctgcctttcccttcatgcttagccgcagtcatttagagcatttcttttactcctgggttttccacctcgatgtctgagatagatgtggggaaaagttcagaccttggttgccagcatcccccagcactgctgagatattgagtggtgaggcgaccccggatcccaggggaatgctgtcagggctaaattcaaaaccctgtttagctgtgaagatccggggctgagaagcaaatctgtggctggctgaggtttggggaggatttgctggtgctagagaggaaagcagaccctacccaaccccacgccctactacagccaccccgacccggctgcccttggacactgttaggcctccatcttggatcctaagggcctttggggtctgtgggcactagccaggctgaggatttggtgatatgggcctcttccccttcctcctgactcactgatgtccacagctgcccttctctgccttccttcctgtttctaagaacgaaggcgcttccactctcagctcacttgtaggcctgctcccgttttgtgacctcaggcttcagaagccctcccactggaccctttttcctggcgtactaatgactcacaactcctcctcctttacgggaacccaggctaggcgtggtggctcatgcctataaccccaggattttggaaagcacagttgggaggatggcttgaggcccagagtttgagaccagcctgagcaacacagcaagaccccatctctctcttaaaaaattatccaggctgggcacagtggctcacgcctgtaatcccagcactttgggagaccaaggcgggtggatcaaaccccagctctactaaaaatagaattagctgggtgtgttggtgcatgcctgtaatcccagctactcgagaggctgagacatgagaatcgcttgaacccaggaggcagaggttgtagtgagctgagattgcaccactgtactccagcctgggtgacagagtgagactctgtctttaaaaaaaaaaaaaaaaaaaaaaatccgtgtgtgatggtgcacgtgcctgtactcccagctactcaggaggctgagtccggaggatggcttgagcccaggagttcaaagctgtagtaagctatgattgtgccactgcaatgcagaatgggcagcagagcgagactccatctcttaattaagtaaatcaagccaaatccaagccagatgctttttactggcccctgctgtttccttctttgtgctgtcacacaggtgatggtgactctggcttcacagggatctaggttcagatcttgggtctcctactgtgacctcaccttggcatgtcttcgtttccctcctccctcttggatccaagagagatctggcgaggatgaagagcagtcacatcccacaagaccctacaggatagatgaccggcacctctcccttgcttctcaagagaaacatgcacaaccccactacaaagaaaagggagcacaggccaggcactgtggctcacgcctgtaattccagcactttgggaggccatggcgggcagatcatgaggtcaggagttcgagaccagcatggccaacatggtgaaaccccgtctctactaaaaaaacaaaaattagccaggcgtggtgacgcacgcctgtaatcccagatgctcaggaggtggaggttgcagtgagctgaggttgcaccactgcacttcagcctgggcagcaagagtgaaactctgtctcaaaacaaaaaaccccacaaaacaaaaacctagccaggagtgcaatggtaggcattccacttggattctttgcaacagtgtgtattgaattatccagcttttctcccccatatactgaagcgttaactttcagttctacctccttctcggtgtagttttggactttcttttcagttccattgatctctctggacatgaataccctgatgtacccaactgtttaaaatatactcgtttgatagtggattttagctcttccctattgctcttgtttttaagatgttatttcttttttttcttgtgagacaaggcctcgctctgttgcccgggctggagtgcagtggggtgattacagcttgctgcaacctcgaactcccaggctcaggtgatcctcccatctcagcctcccaggtagctgggactatacacgtgtgctaccacgcctcgctaatttttgtatatttttgtagagatggggttttgccatgttacccaggctggtctggaactcttgggctcaagcgttccacccgcctcggcctcccaaagtgttggaattacaggcgtgagccaccgcacctggccttgagattttttttctttttctttttctttttctctttctttttattcagagtcttgatctgtcgcccaggctgaagtgtagttgcatgatcttggctcactgcaacctccgcctgccgggttcaagcggttctcctgcctcagcctcccgagtacctgggactatagtcacgcgccaccatgcacggctaattttttgtatttttagtagaggcggggtttcaccatgctggccagggtggcctcgagctccttaccttgtgatctacccacctcagcctcccaaagtgatgggattacaggcgtgagccaccgctcccggccgagatttttttctcacctatctttgaatctcagcttgtagatttcatctgccccaaagcttttttctgtccctgcgcacacaggctggatgtgagctctccttcctccaaatacttaatgttgctcttcgcagctgccatgtgcattcgcaccctctgtgttgtttctgagtaacatgttatgacagctgtgagtgcctcgtgggacaggatccatctctatacttgaatcttgcccatccccgtgccaggtccacttggctcacctagctttgcccctgacctgactgcctctccccacaggctacattggcgtggtgaaccgcagccagaaggatattgagggcaagaaggacatccgtgcagcactggcagctgagaggaagttcttcctctcccacccggcctaccggcacatggccgaccgcatgggcacgccacatctgcagaagacgctgaatcaggtactgcaagggtttgcacgtagtgtgcagtggcataggctgtgcactgcacaacagctgcaatcctcactggcacttgtttcaggctagagcagcacttgttttagcaaaatgggttcagtccacatttagcctaggagtttgagaccagtctgggcaacatatggagaccccatctctaggaaaaatagaaaaaattagctaagcatggtggcacatgcctgtagtcccaggtactcaggaggctgaggcaggaggatcacttgagcctggaaaatcaaggcttcagtgagccatgttcatgccactgcactccagcctgggcaatagagtgagaccctgtttcaaaaacttaaataactaaataaaagaaatgtacttgattcagggtctggtgaagagcagatgttcagtgacttggtgctgctactattacaaccatcactgttattattaccaaaattttaattatcattgtaattattcagtcatttacccagaagactgtatgcattgcctggggttggtgacagggggttaataactcttttttatttattattattattattattattattattattttttatttttggagacacagtctcactctgtcacctaggctagagtgcagtggcatgatcttggctcactgcaacctccacgtcccaggttcgagtgattctcctgcctcagcttcctgagtagctgggattacaggcgtgtgccaccacacctggctaatttttgtatttttagtagagatggagtttcaccatgttggccaggctggtctcaaattctgagctcgagtgatccgcctgtgtcagcctcctgaagtgctgagattacaagcatgagccaccatgcctggcctatcgttctcttcttgtaagtaattgattcacatggtgcataaacagaaatggtattaaaagctatacagtgggccagtgtgtggtagcaggggcaagacgctcctcctcgctgttttctagcaccttccagggtggcagcagggcctcagcagcactccagcagtcatcttttcatgcacatatcagggggacacagtgtccacacgagagtaggttcctgtccttgtagaaggcataattctaatgggggagactgacacccaacaaaccgccagataaatgcacgatcaagaatccagtaggggcgcgggggccgggaaaagagccacccagagaaggcagctcaggagagcaaagagggaagtcagtgtctagagggaggggccctccaggagaggaagctggggtgcttacaaacgggagtagggagaggaagggaagtaaaactccgcagctggctggggcctcctgagagccagcagtgaaaagtccagctggcctccagggagcctggagggggctcagcctccttccacgtggggtgcttcccagagcagcagcgccccttcctctccatttgctcatgacttaagtgccctagtatcctgtcacagaccaagggaaggccagcgtagctccctgcctttctaggcagcccacatagacgggggtcgatggccagggctgcagggcagggacccttggtcacggaggtctttgggttaccccacttgctccatgccatagatgtgaggttccttcatgcctcttttctagctcgccagacactttgtatttattttttatttttttgatgattttttttttttttttttttttgagacagagcctcactctgttgcccgggctggagtgcagtggcatgatctcagctcactccagcctccacctcccaggttcaagtgattctcatgcctcagcctcccaagtagctgggattacaggcgtgcgccaccacactcaactaacttttgtatttttagcagagacagggtttcaccatgttggccaggcttgtctcctaatctcaggtgatctgcccgccttagcctcccaaagtgctgggattacaggcgtgagccactgtacccatcccggccttcccctcaaccccagatggagtctcgctctgttgcccaggctggagtacagtggcacaatctcggctcactgtaagctccgtctcccgggttcacaccattctcctgcctcagcctcccgagtagctgggactataggcacccatcaccacacccggctaattttttttttttttttgtatttttagtagagacggggtttcaccgtgttagctgggatggtcttgatctcttgacctcatgatctgcctgccttggcctcccaaagtgctggaattacagtgtgagccactgcccccggcccatgcccagcctttttgatttttcagacaaggtcttactctgttgtccagaatggattgcagtgacacaaacacggctcattgcatcctcagcctcctgtactcaagcgatccttttgccttagcctcctgagtagctgggactacaggtgtgtgctgccacacctagctaatttttaaaactttttttatcttttgtagagagaaggtctcaccatattgcctgggctggtctcaaacgcctatcctctagtgatctgtctcaacctccccaagtgctaggattacaggcgtgagccactgcacccagctttctctgttgtaggacagatggccaaactctgctttacactttgcaagtataggctgattttatggctttgtttttctttttctttttttttgagacagagtcttgctctgtcacccaggctggagtgccattgtgtgatctcggcccactgcaacctccacctcccgagttctttctcagcctcccaagtagctgagactacaggcacccaccaccacaccgagataatttttgtattttttggtagaaacagggtttcattgtgttggccaggctggtctcgatctcttgatcttaagtgatccttctgcctcagtctcccaaagtgctgggattgcaggtgtgtaccaccatgcctggcccacatttgtctattttgaatcttccttgcttttctctgtagatgcagatgcagccggggagctcatcttgagtgcattctccaccttttcaggggcgatctttccatcttagtttgtagggcctgtccccatgtgtgttcattggcccccgtttccgtggtctggatggactgtccttgcaagctgttgcttgtcctccaaggcgtggataggcccagtgcctgatgtcggccccgtgggctgtttgtagcctcttacactcatgggcagctccgtgccgtctccgttcccagacatgagtgtgtctgtggcttgatttatctgttgctgtctctcaaggctgtgtggtgtggtggccgcatagtggcaccctggtgttggcccttggttggggggagtgtgtctgccactccctggtatcctgcccatgccaccctttctgatctctgacctctctcctgcagcaactgaccaaccacatccgggagtcgctgccggccctacgtagcaaactacagagccagctgctgtccctggagaaggaggtggaggagtacaagaactttcggcccgacgaccccacccgcaaaaccaaagccctgctgcagtatgtaccccggcacccaccaccaccaccaccctggcccctgccttccatcagccacagggccccctaggctgggcaccactcatcactcgtccactcattgattcagcagacacttgctgcaagccttctgcgtgccaggctccatcctaagcatggcattcgccccagtggaggggacaggtgtccgtccctgcccctggagtgctcagaatggggggaagtgggacgaatgggacaaaaaacaagaaagaaaatgtatagtgtgttaaatgtcaaaatatgaaagtggtgctagtgtgggagttgtcgggaacagcctcctttagaaggtgagcattggccggccaggagcggtggttcacgtctgtaatcccagcactttgggaggccaaggtgggtggatcacctgaggtcgggagttcgagaccagcctgatcaacatggtgaaaccccgtctctactgaaattgcaaaattaggctgggcatggtggctcacacctgtaatccccgtacttttgggaggccgaggcgagcggatcatgtcaggagatcgagaccatcctggctaacgtggtgaaaccccatcactaccaaaaaaaaaatacaaaaaactagccaggcgtggtggtgggcgcctgtggtcccagctacttgggaggctgaggcaggagaatggcgtgaacccaggaggtggagctttcagtgagtcgagattgcgcaacttcactccagcctgggcatcagagtgagactctgtttaaaaaaaagaaaaaaggccaggcacggtggctcacgcctgtaatcctagcactttgggaggctgaggtgggtggatcaccaggtcaggagattgagaccacggtgaaaccctgtctctactcaacgtacaaaaaaattagccgggcgcggtggtgggcacctgtagtcccagctacacaggaggctgaggcaggagaatgacatgaacccaggaggcggagcttgcagtgagctgagatcacgccactgcactccagcctgggtgatcgagcaagactgtctcaaaaaaaaaaaaaaaaaaattgcaaaattatccaggcatggtggcacatgcctgtaatcccagctacttgggagactgaggcaagagaattgcttgaacccaggaggttgaggttgcagtgagccgagatcgtgccattgcactccagcctgggtgatagggcaagactccgtctccaaaaaaaaaagatgagtgttggccaggggtggtggcttacgcctgtaatcccaacattttgggaggccgaggcgggaggatcacttgaggtccggagttcaagaccagcctggccaacatggtgaaacccctgtctctactgaaaatacaaaaattagccaggtgtggtggcaggcgcctgtaatcccagctactcgggagactgaggcaagagaatcgcttgaagccaagaggcagaggttgcagtgagctgagaacgtgtcactgcatatcagcctgggcaacagagtaagactccgtctcaaaaaaaaaaaaaaaaaaagaagttgagtgtcaggcgaagacctgaagcaggtgagggcagggcaggagccgtgtgggattaagcccggccagtgcaaaggccctggggcaggactgggccgggcatgtcagaggaagaccctgtggctggatggagtgagtgaggggagtgggaggaggtgatagagcaggttgtgcagggccttgtggggcctcagggaggacattggcttttgctgtgagtgaggtgggagccatggacagttctgagcgcaggagagtcaggactgactcaggtgctcacaggctccctagccgtggtgggagaagagacatgggagagcgggtgggagccagaccttggctaggttaggtccctctccagcttggcctcttaagatccaccccatgacttggttggtgcagctgcttagctgtgagattgggaagcaggtgtgcccccacaatcccaaattctcactcggggactcttctgcctctgaccttttggcttttggcctgtaagggaccttgaggcactggaacagctggaccagagcaggtgacagggacacctgggtagctcatactgcagacagtgccatgcatgaggcacttcccacagggacaccaggaggacaccgcctcctctggccatcacagccctggcatccccccaccccctctgccaggcagtagtgcatggtcgtgggctaaggggccagagtgcttttatgctcagacagccttgactacgttacaaaacactttctacagagcagatagtggccctttgcaggcttcaggaggaaattcatagccggggatggtggtgcacccctgtaattctagctacttgggaggctgaggcaggagaatcgcttgaacccaggaggtggatgttgcagtgagccaagattgtgccactgcactccagcctgggtgacagagcaagactctgtctcaaacaaacaaagaaacaaacaaacaaacaaacaaaacacaagattcagcctactagactgaaggaagtgttgttgtggaggattcagcctaagggtggacctgggcctgctgggtgaccacaggcaggtgattggacctctctgagcctcattttctgcacctctaaagtgagggtcatagcagctgtcatctcacatggccatggggacaaactggcagattacaaggtgcctgtaatcccagcacatggggatgccaagtcaggaggattgcttaaagccaggagtttgagaccagcgtgagcaacaaagtgggatcctgtctctgaaattaagaaaaaaaaaaaaaattaggctggggacgatggttcacgcctgtattcccagcactttgagaggcttcagtggatggatcacttgaggtcaggagttcaagaccaccttcaccaacatggtgaaaccctgtctctatgaaaaaatacaaaaattagccaggtgtggtggtgggcacctgtagtcccagctacttggaaggctaaagcaggacaatcacttgaacctgggagtcagaggttgcagtgagccaggatcacaccactgcactccagcctgggcagacagagcgagactgtatctcaaaaataaataagtaaataaataaataaataaatttaaatactacttgttaagcctatggcaggactgggccaggggatgcccatcacaaacagtccctgtcccccggggcttagcacgttacgtcatttgtaaccagttgccttgcagggccctccctgcccaggcactctcaccatggagaagcgccactgttatctgtgtctcctgtcaagagctgggccttcttgctttagcattttatctgagggtccaaggtcctcatgcagacatgggcggtctttctcggttcacgccttacaagagaacgggaattacggtaatagacttcccccagcctgaattctgcacttggcttttctcttcttgttaaagcaaagcctggagccttctgtctccgcctggtgcagcccacagactgttcatgtatcccagtgcccatggggacacccagggtttttttgtttgtttgtttgtttgtttttggccttaaccgatgcttgtaagttcatctgtgactgtacaggcaaggattcctgcagggcaaagaccccagcagagggatcttgggttaaggaacatacgtgtttaaaattgatttttaatttttcattttattttatttatgtatttggtggttttttttgtttttgttttgagatagagtctcgctctgtcacccaggctgaagcgcagtggcatgatctcagctcactgcaacctcccaggttcaagcgattctcctgtctcagcctcctgagtagctgagattacaggcatgcgccaccacacccagcaaatttttgtatttttagtaaagacaggggtttcaccatgttggccaggctggtgtcgaactcctgaccttaggtgatctgcccacctcggcctcccaaagtgctgggattacaggcatgagccaccatgcccggacctcatgtatttgttttttaaacggggtctcgccttgttgcccaggctagagtgcagtggtgcaatcccggctcaccgcagcctcaccacttgggctcaggtgatcctcccaccacagcctcccgagtagctgggaataatacaggtatgcgccaccatgcctagctaatttttgtatttttgtagagacaaggtctcactatgttacctaggctgatcttaaactcctgacctcaagcaaaccgcctgcctgaactttccaactatgagatcgcagacgtgaaccaccacgcctggccttgtttttttaatttttatttattttattttattcttttgagacaaggtctcttgttctgttgcccaggctggagtgcactggtgcaatcacggctcactgaagcctggacctcctgggctcaagcaattcttctgcctcagccacctgagtagcctgatcctcaggcgtgcaccacagcacctggctaatttttaaagtatttctagagactggatctcactatgttgcccaggctgtctcaaactccttagctcaagcgatcctcctacctcagcttcccgaagtgatgggattacaggagtgcaccaccatgcccagcccaactccccctttttataaggacaccagttatattggctatgagcacaccctgtgatattctcttgactgattacatctgcagtgaccctgtttccaaataagagtacattccgaggtacaggggggcaggattcaacccgaattccgcgggacaccgaccagccggtcacaattgtccagaatgctctgattgtgcagcgtgggttgggcctgtaaatcacctccagggcccccaggaggctggtgcccaggtgtgctttgtcccctgtggctgagagcaggtccccagagtctccatccttgcctaaccctccccctccccccgtcgcccagtctgttgtctgtcattagtttagtgctatgcctttgctgaccttggtcctggtttggtccacaattcaaattctccattccaggctgggtgcagtggctcatgcctgtaatcccagcactttgggaggccaaggcgggcggatcacttgaggtcaggagattgagagaccagcctggccaacatgccgaaaccccatttctcctaaaagcacaaaaattagctgggcatggtggcgggcacctgtattcccagctactggagaggctgaggcaggagaatcacttgaacccggcaggcggaggttgcagtaagctgagattgtcccattgcgctccagcttgggcgacagagtgagactccagctcaaaaaacaaaaaacaaaaaaaacaaattccccattccaggtgaagcattaacctaggcctttgtgtgtctcctggaaggaaattaaatgtgcacaccctttacttcatgtgaggaaagagattttggggatctgggcagcttgtgcttgcctctcccagttggggtatgaaggagacccccctttctttggcagcccagccttggtggccctgacagtggtcaccatttgagcagttcccctttaggagcaagtccccaggtacttcagtagatcatgatttttgggagggaaactgatgaagggagacagcccagtaccctaaggagagcaattaggaatgcttaggaaaactaaaacgtgaacaagatcatcctacttttttactattcacgatgccaataggcaatgctgagagactctttttaagggccaggcccgttctaaggggcgacacatgttattaccactttttgtccattagatgagcaattgtttaccaacaaaaattttctttcttttttttcttctttttttgagacagggtcttactctgtctcgcccaggctggagtgcagtggtgcgatctcggctcactgcagcctccgccacccagattcaagcggttctcctgcctcagcctcccgattaactgggactagaaacgtgcaccaccacacccagctcgtttttgtatttttagtagagacggggtttcgccatgttgtccaggctaatctcaaactcctgggctcaggtgatctgcctacctcagcctcccaaagtgctgggattataggtgtgagccaccgtgtccagtatatatatatattttttaataaaatgtggtctcactgtgttgcccagggtggtctcgaactcccagactaaagccatcctctcacctcagcatcctaaagtgctaatattgcaggcatgagccaccgcacccggccaataaaacattttaacttgtgtgaaaccaggtgtctttgcagaattaccattagtggcagcattttttctttttttgtgggcacacaaaataacagtgcattttaggatcagtgacttcttggaggtaatgagatctaaaaacatcttcagtctccacgaaggaggtagatgttgttaccctcaacccattttgtagatgaggaatcggaggctcagaggggcaaagtcctgtccaaggcctcacatcccatcgatgggtcaggaccaaccccagcaggctgggaggtggcgggaacctatggaagccacctgaattgtggggaagtggctacctttccttcccagcatcctgtaaatcaagttgagcttcagggcagaggtgctgagctttgacccctgaacttcactcctgtcttctgcaaagtgggaggaataagtgggccttctcagatcgaatgggtgaataatcggaacaggcttagcttgagcctgactcgtagccagcatttgccattgggagctcttgaatttggtttatttgtcttaatatagacagaagacattttgctgctgaaaaatggtaaaagaacagtaaaccctggcttgacttggaacatcattccagagtagtgtggaaacctccgttttgatgcttgctttttccttttcctcataggatggtccagcagtttggggtggattttgagaagaggatcgagggctcaggagatcaggtggacactctggagctctccgggggcgcccgaatcaatcgcatcttccacgagcggttcccatttgagctggtgaaggtagtgccccccggggctgggccctcccgtctctggtcaggcaccctcctgctggcctcaagccaggcctcctcccaggcaataaggtctcaagctcctacctctaggcctgaacttgtggtgggcagggtgtggcctggatgaggtgtccccatgggcttccttttctgacactcagctttgaggttttgggcagaacaatatgaaaacccctgtgtttttcctctgacaaaagccaatatacattctttgcaaaatacatagaaaatacagataaatttacatgagaagatgtccctagcatgtcattgaagaaggaaaaaataggcattggagccagcatgtgcaacatagcactgagctgatatatacaacatccttatgtatgaaactgaacatggatgtctgtctacaagtgtttctttgtatttgcaaggatgtttgcaaaaatgtcagccctgggtgctaggatttgggacttctttttccgtgtgtgtgtgtgtgtgtgtgtgtgtgtgtgtgtgatttgcttgaagttttatactgtttacaatgagcacatagcattttttattaaaaaaacaaacagttttttaaaatcagaggagcaagaccaaatgcagtggctcacgcctataatccgtgggaggccaagggggcctgatcacttgagcccaggagttcaagaccagcctgggcaacatggtgaaaccccatctctactaaaaatacaaaaattatccaggtgtggtggcatgtgcctgtagtcctagctacttgggaagctgaggtaggagaatcacttgagcccaggaggcagaggatgcagcaatgagccaagatggcaccaccgcactccagcctcagtgacagagccagaccctatctcaaaaaaaaacaaaaaaaacaaaaagaaagaaaaaagaaaaagctgggtgtggtggtgcatactgatagtctgaaaaatctaagtttacatgaatttatattcccaccaatatgatgagagagttggtgtcatgtcatgctttctgaaactgggttttaattaattaatttgtttgtttatttttattttttttgagacagggtcttgctctttcacccaggctggagtgcagtggtgcaatcacagctcactgcagcttcgaccttcctgggctcggatgatcctcccacctcagcctcccgagtagctgggactataggcgtgcaccagcccacctggccaatttttgtatttttagtagagatggggtctcactatgttgcccaggctggtctcaaactcctgggctcaagccatctgcctgccttggcctcccaaagtgctgagattacaggtgtgagccactgtatctggccagttttcaattttttaaataaaattttgacgagttaaatattctgccttgtgaatatagccacacgtgggagagaacgttccccagatgcacgcctgccacgggggcgccccgggtgcctccatgcatgtgcttggtttgtctcttctcagatggagtttgacgagaaggacttacgacgggagatcagctatgccattaagaacatccatggagtcaggcaagttccacgaggagagtcaccactgttccttcctctccgtggtgcgaccccccagctaattgggtcacccacacctctgagtccctaatcgttaggccttaagagggctcttggatggttttctgtagctgcgagcccctccctgagggtctccaagggcacatgagggtggatgtgtcttagtcctgcgtccattgcaggcttcagggctgtctgcagctcctgatcaaatagggcttagttcctgcccagtcggttggtgtgaacctcatgctaaactaagaatgctcactgcagatttgcctggggaggggcggggcggcactgaatcagggttttgggaagccagcatgagtccccatcatggcttcctcgtgagcctcttgggtcccctccttattctaacaaaggtagttgctccaggtgtctgcccttccatcgccgtggggtcctcgggtcaccctgagggtttccgggcagtggactcaggcatccgaccccacacatgacacaaccttcattccttgttggggacccggccagggccaatgaaattgctgaccatgctttgtttctctctgacttatctcccctgcccccgggtctggacggtttcaggaccgggcttttcaccccggacttggcattcgaggccattgtgaaaaagcaggtcgtcaagctgaaagagccctgtctgaaatgtgtcgacctggttatccaggagctaatcaatacagttaggcagtgtaccagtaaggtattgctccctcggcagggtgactcctgaccttgtggaaacgggggtacgggggtttggtatcaggctcccagcgcctcattggcccccactggtgccttttctccccatatcgctttgtgtccgtgaacttggcctctccccagaggctggggcaggagcatgtaggcctgggcccaggcacacaggggagtgccaggcctcctggactggccagacagatgcacagttgtccctgggaccctgataccaagcctagcatgtgtctgatgaaattggggtttcactgggctgttgctttgctgcctcctgggaagcagagagggaccccccgcgtcaactgctggaggctgagctccttgaagctccctggctgtcaccccttcttgaccaatgcccggcattctcagacttccctggagccaccgacttctctgtccctcagctccgggaatggcctgaatgccagcgacatcatgagagccagctggggtcctaagtgcccctgcccaccccctgcaccccacgctgtcccccaggggcagcccatttttggatccacttagtcacagtgcctctatgcgctctcgacgagccactgcctccactcagcaggacgcgccgggctcccccaacccgcgccaacgccgcgggcctggttcccagggcagcacgctttggccaagcagctgaaatgcctcccagtgggcagtctgtgcttgcgcgaccacagtgtccccagcgctccgggttgccagggaatttctgcttgagcccctctgttcttagtctggaaaagcccacatttgctgcttaagcttcttcgattagaaaagggagggggaaaacagtccaaacaggttggaaaacgctcgtcctagagccaggtgtcatggacatgaatgttagaggactccgcacaccttggctgtctgtctgtgcaatgacaaccccccgtggcccttctgtaactacaccccagaccgagcccacacccccaaaccccagacctctttgatccgaagcagcttccggggcaaatgcgggcgcaggctcccccatgcatggactaatcagatgactctcgtttcttctcttctctctgtctcctgtcctgcgtgtgtggcctgcactgtccctgggtgtctttctgcctcatcctgccctccgcatgacccaggacggggctcttcacccccgacatggcctttgaagccattgtgaaaaaacagattgtaaaactcaaagagccgagtttgaagtgtgttgatctcgtggtctcagagctggccacggtcataaaaaagtgtgccgagaaggtaacaggttttgttctcatctccgcatttgtccccgtcctccccctccatgtgttagtctcaacccgagcatctggaaaattcagcctcggcaggaacccccttccgcctaccagttgtcacttagagatgtcgccaccttgcattggcagatggaatggggggagtggcatcacacgtgggttgtggctgcccgtgggggcggtcagcctttgttgttgccaaacgcattgcatttactaagcagtgccctttcctggaacccctagagaaaggggtttcccagccagcaccaaaacagcaaaacacaggaaacacatcatctgtatagccctgcatgttctcacagtctaggccacctgagagtaaccattccattttccccgactcgtggacttgacccacactgcagaagatgggactcccctgtgcatgaggtctggttaagttggtgctgcagatgaagcctggggaggtgggggcatttggcgagtgtgtgccacagatacagtgatcaggagtggttctctgcaaggagttcctatcgaggctgatggcccagatacccgccttaccattctagaacagacgctactcactcacgctggcgaggcccttcagggttcctgctctcacccagtgctgggcaagaggggggtgccctgaagccctgcatggcaaacatgcccctgcttttctgctttcatgttgcctcctgcctcctgccccccggtcactggctggaaaagcagctctgctctcctgctgtctccggtccacggtgcccccactcttctgctcttagctcccagctggactcactgggggccaggagcaaggtgtgggctcggtgggccccctcatatctcattccccacccccctccgcattttctacctgtgtggttcatgttgcttcccgtgccacgaggaccccgccaatgcgaccactctgcttgttcccccagctcagttcctacccccggttgcgagaggagacagagcgaatcgtcaccacttacatccgggaacgggaggggagaacgaaggaccaggtactggccttttgtcttctttattgggtataatttacatgcagtaaatgtcaagtgtactgttctgtgcatgctgacagctgcatatggcaaagtaacccttacctcaatcaagatacagagcggttccgtcacctcctaaaatccctgtccctatcatgctgacagctgcatatggcaaagtaacccttacctcaatcaagatacagagcggttccgtcacctcctaaaacccctgtccctatcatgctgacagctgcatatggcaaagtaacccttacctcaatcaagatacagagcggttccgtcacctcctaaaatccctgtccctatgcccctttgtagtcaacctctcaaaaacccacaggccaggctgggtgtagtaactcacgcctgtaatcccagcacttagggaggctcaggcaggaggattgcttgagcccaggagttcgagaccaacgtgggcaacatagcaagaccttgtctctacgaaaacataaaaaaattagccaggcgtggtggcgcatgcctgtggtcccagttacttgggagggtgaggtgggaggatcccttgagcccacaagatcaaggcttcagtaagttatggtcgtgccatcgccctccagcctgggagacagagcgagaccccgtctcttaaaaaagaagcagcaaaggaaatccccaggccctggccaccaccagcccgctccctatcctacagtccttcaagtggactcccacaacgtaaggcccattgactcttgactcccttcctgccacccttcttccctccctccctcccctcggcgtctgcatttgggagccaagcgtgttgtttgttgtatctgtagtttgctgccttgattactaagcaatcttccagggaatggatggagcacagcaaggacctccacttgcctgctggagggtgtttggggtgctttttgtgttgtggttttttgtttttttttttttttttgagacagagttttgctctgtcgcccaggctggggtgcagtggcacgatcttgactcactgccacctccacttcccaggttcaagtgattctcatgcctcagcctccgaagtagccaggactacaggcacatgccactttacccacctaatttttgtatttttagtagagagagattttcactatgttggccaggctggtcttgaactcctgacctcaggtgatctgcccgccttggcctcccaaagtgctgggattataggggtgagctaccacgcccagcctgctttttctttttttaacatttaacgctttcttgcaaaggcatgcaagcacacaccccaagttgctgcctacccctcagctgagactgtcacccacgaagcactgggccgtccttatactctcctgcagccgcagcctcagcctcccaagtagctgggactataggcgtgagctaccacgcctggctaatttttgtatttttagtagagatgaggtttcgccatgttggccaggctggtcttgaactccttagctcaaatgatccacccacctcagcctcccaaagtgctgggatgacaggtgtgagccactgctcccagatctgttttgagtcactttctctcagttgtcctctgtgttctttttacaactgtttgttgaaaccagagcttaattaagcccttgcttgctatgtcactttgtttaaaatggtccctctccccttgccattgatggggatgaaatgggctcatttgtcctgcagggaggcgcccagttttgatttggccaattgctccctcagggcaccagtccacctatgcctcatagctgctgtagcttggaaattgtatcaaaagtctggaagagtctgattctttttgttgttactgttggtaagaatgctgccggcccttccacagcccctggtgcccacctgccatgctgccaggccggatctgagagcgctgggttgaggagactcaggccttactaaaccagccacgctcgctcccacagatggagcaccctggcattttccagcaggcgacaggtccgagtgccttgccctactttattctcaggaacttggaggtgcagtgaggggaagtgactggccaagggccaggggagtccagtgacgcgcatcccagcgcctcctccccagcagcctggcctgttataaatgggaatcaagccagtgagctgcctggatccatggttcccatagaccaacttcatcctgggcaaaagacaagaaggatgagggagggagagtttcagcaagtgcagtggactcataagccctgctcctcacatgagacctttctagcttgatagcttgagcgtgtgtgtgtgtgcgcgcgtgcacgtgcacgtgtgtgttttattttagtgttcataattggacaaattagcttcgcagttttaatgcaacactttgaacacgccaggcgctaaagactttacaggctggacacggtggctcacgcctgtagtcctagcactttgggaggccaaggcaggtggattgcctgagctcaggagttcgagaccagcttgggcaacacggtgaaaacccgtctctactaaaatacaaaaaattagccaggtggtgtggcgtgcgcctgtggtctcagctactcggaagactgaggcaggagaattgcttgaacccaggaggcagaggttgcagtgagccgagattacgccattgcacgccagcctgggtaacacagtgagactctgtctcccaaaaaaaagaaaaagaaaaaaatacaaggcagtggcttgcagtggttcacacctgtaatcccagcactttgggaggccaaggtaggaggatcacttgagcctaggagttcaggaccagtctgggcaacatagtgagaccccacctctacaaaaaaagaaaaatcagccaggtgtggtggcacatgcctgcgaccccagcatcttgggacgctgaggcagggggttgcttgagcccaggagtttgaggctatgattgttctactgcactccagcctgggagacagtaagttcttttctcaaaaaaaaaaaaaaaaaaaagccaggcgcagtggctcatgcttgtaatcccagcactttgagaggccgaggcgggcggatcatgaggtcaggatttcgagaccagcctgaccaactcagtgaaaccctgtatctactaaaaatacaaaaattagctgggcgtggtggcaggcacctgtaatcccagctatttgggaggctgaggcaggagaatcgcttgaacccaggaggcagaggttgcagtgagccaagattgtcccactgcactccagcctgggcgacagagcaagactccgtctcgaagaaaaaaaaaaaaaaaacaaaaaaaacaactgcacattattaaacccttggcagttgggcctcctgtcaccccattccacagctcagtaacgtgaggcccagggtcacacggccaattagtggctcaatcaagactccagaccttggggacagcggccctgcctgtgactggcacattgggctgcgtggctgtgctctgttgtcccaggctctgttgcctatgagggtgtggggagtgcgacgccagcccctgttctcctgtctgggaagcctcctggttcccacgccttccctgctggcaaggccaggaaatgctcttgccgctgcccccccttgccaggcttggccttgtactcacagtgacccccgctctcccccagattcttctgctgatcgacattgagcagtcctacatcaacacgaaccatgaggacttcatcgggtttgccaagtaggtacttttagagactggctggtcgggcggcaccaatcctcactctcagatccaaggaggtgactgagttgggattctctgagagggcaggtgtcagacagtctctgtcgggggtcctggggtgaaggcagagccaactgagaatatctggaagctctcctgggctgatagtggtccactgtccccaaccaacacgccttctgtgaggcatccccatggttagtttagggagagggcagtgctatgttcagatctgcagggagagggggaagccagccagctgctgcaccccctctccttcaggacttctcagagcctttagcgaccagtgtgcagcttttcccagactctgccacttcatggacagcatctcatgggctcagggctccggaagctgctctttgggaaatgctgcctggggtctccctagcttcaaggcatacactgtagatttaaaccagaaccttccgtggcacccagatgagggcccacatcggggagccctgatttcagcaggatgtcgattcagtgtgcgtggtctcaggcatcacccgctgattccttcagccccttggcatgcttaggcctcactcagattgttggagaggctcacgcaggccttcctgcctgaggcaggccgggtggtgccgctggtatgccctctcgctgggccctgtgatagagcagtgggcaaacccacacccagctccccaccctcagaggaagaccacatgcagggaaccgatggggacccagggcgttaaggtgtagtgtgcttagtgctgggcggggccgtgcagggcttgtgggtgtccagagggcggccactgggccttgccttgaggggtcaggcaggcttcctaggggagggcctctagagccaaatctcaggctatggagtcaccagatacaacatttatcggtgcacctgacaaagctgattgaggatctgttccgtgctgggcaccaggtaggtgaggagaagggaggaaggaaaacgaaggaatgagggcctcatcagaacccctcctagagatgagccgaagtccctgactgggcctcccctgcctgtgggtggcagcccccggccctgtgctcccggccgccgggtgtgtgtgggctcacagcgctggtccccatctttggtttgctgctgttttcctcaccttgatgtctctgcttctcacacttcatccacagttccttctcacaatctctcctgtttttcctttgaccactctttcctctggattcctgggccttcccacttaccccagctgttactatactgagcagctggtgacctggtgggtattgcctgctgtgtgcctttgccctggtgtgtgaacggggtacgccctggctgggtggccccagccctgggtgggacatccctggggcccgctgaagagctacggggtgctctctcagagccagggccagtgctgggcctctgggccaggaccttgaccgcaccagctgtagcccctgctgtttcagagcctgcaggctggggaggtggagtccttaaacaaattgtcacaaggatgatgagagtaggaagagagggtaggggatagactatgggaaaggggagctgggaatgtggcctggagagatcttcctgaagaagtcaggtgatgccagggggacccagagaattggacccagggaaggaaggctaccagaccaggcaggtagaggtaagagagccagcggccaggccccatcgccaggagggccctgcaggtccaggggaggattttggattttcccccaagacaccaggatgcttctgattagatccaggcccaggagaggggccaccttgtgggctgctatttgagggagccctggcaaggatgggagccaggaggcccttaggaaatagcacctctggaacctcactgtcacccagccatcactgtggaggttggctcagctcagtgccacctccttcagatgctgttgatgaaaatccttcttgtgcttgaatgttctgggcttcccattgccctccaaatgtatattataaacagggcccaagcctggcgcagtggctcatgcctgtaatcccaatactttgcaggaggccaaggtgggtcgattgctggagcccaggagtttgagaccagcctgggaaacatggtgaaaccctgtctctacaaaaaatacaaaaattaactgggcatggtggtggtgcgtaatctcagctacttaggaggctgaggtgggagaatgacctgagcccaggaagtcaaggctgtgctgagccatgatcacaccagggctctccagcctgggtgacagagtgagactctgtctcaaaaataaataagtaaataaatagcccagataagaagccctataataaacttactgaatgttgggaatatcactggataaaattctgcctttgttcttagttttccagcctttcctgatctagaaacagaagcctactttctcccttatcctacagccaacttggactttaaaacaaaacccccgaggtagtcagcaaaggaaggtgaccaagctgacttgcttttccatattgttctgaaagtttcagccaaagcaataagaaaagacaagaaaatatgatggataagtaacaggagatatatgttgtttgcaagtggtgatatgattgtcagagtagaaaatatattagaaccgtaaggtggtggagtaggtgtccacatataaaatatagtgggatttgtctatgccggcatgaactagccaggaagtaggatggataaagaagaaaagagatctgggattgtggatgaataaggaaccttatagaaacacaccctgtcgaccttggatgtcctctaaatttgggtcaggagtcatgcaagatatgtgtcatttcatgaccagcagctgtcccacagtctgatgtctaagactggatggctctgtggttagagccacttacaggctggtgttgggatcaaatgatgagaagagtaggaagaagggccaggtgcagtggctcatgcctgtaatgccagcactttgggaggtggagccaggcagatcccttgagtctaggaatttaagaccagcctgggcaacacagtgaaacctcgtctctacaaaaaatcaaaaattagctgagcatggtggtatgcacctgtggttccagctactcgggagactgaggcaggggaactacttgagcccgggagggtcaaggctgcagtgagctgtgattgcgccactgcactcatcttaggcaacaccttctcacacttccccttagaaactccgggattctagtgacatctggaagtaacctgcgctttagtaagtcggctgagatgagggcctagaagcctcaattgaaccagatacatttacttgttccgtgtgcccaggccgtttcccttgcgcagctctgtgtgtgcagggggcttctctctgcctctacctgtggctgctcacttggtccccagggagagaacggccacattcgcctcttccccttcttcccccccggcatcttgtccacgtgaaccctgtctgttctttggtttcagtgcccagcagaggagcacgcagctgaacaagaagagagccatccccaatcaggtagcacacccctctgcagtctcccgctctaccctgggggcgggaggacgctaagtgacagctaagcccccgtgatggagctcggcctgtgtaaagccccaccccacagcctcagtaccaggccatctgctctctctagaggccacttaggaattgataattctgggagatggcctgagagccaacactctggcagggcctagtgggcacattttacccacccagaaggccctatgtgccatccaaggccagggttagaacttgactcttggctgggcacagtagctcacacctgtaatcccagcattttgggaggccgaggtgggaggatcacttgaggctaagagtttgagaccagcctgggcaacatagaaagactctgtctctacaaataataatatttaaaaattacctgggagtggtgggctcatgcctatcaccccagctacttaggaggccaaggtgggagggtcacttgagcccagcagttcatgaccatccggggcaatacaatgagacctcatcttaaaaattaataataggctgggcacgatagctcacacctgtaattctagcatgttaggaggctgaggcgggcggattgcctgagctcaggagtttgagaccagcctggctaacatggcaaaaaccccatctctactaaaaatacaaaaaattaaccaggcgtggtggcacgcgcctgtaatcccagctactcaggaggctgaggcaggaggattgcttgaaccttggaggcggaggttgcagtgagccaagattgcgccaccgcactccagtgtgggtgacagggccagactctgtctccaaaaataataataataaagatataaataagaatttttcccttgagcgggggtctgtgacctctttgagctttccaacacagccccagggattgggagcccctaggtgagagccgctggaaactacattgtcactagcagctcaggggagcttgggatagttgaagccccacacctggagaagccctgagccacaaagggttgtaccttgacatcttaacccagctagaggccttgtgaaatatgaacggctgtatcaatgcctgccttcagtaccttattattattattattattttgacacagagtctcgcattgtcacctgggctgcagtgcagtggcgcaatcttggctcactgcaacctctgcctcccaggttcaagcgattctcctggttcagcctcctcagtagctgggattacaggtgctcaccacaacaccaggctaatttttttttatttttttcttgagatggagccttgctctgtgtcccagctggagtgcagtggcacgatttcagctcactgcaacctccacctcccgggttcaagcaattctctgcctcagcctcctgagtagctgggattacaggcgcccgccagcacgcccagctaatttttttgtatttttagtagagagggggtttcaccatcttggccaggctggtctcaaactcctgacctggtgatccacccgcctcggcctcccaaagtgctggaattacaagcgtgagccatcacgtccagcctttttttttttttttttttttttttttgagacagagtctcactctgccaccaaggctggagtgcagtggcgcggtctcagctcaccacaacctccgcctcctagcttcgtgtgattctcctgcctcagccttctgagtagcgacgattacaggagcctgccaccacccctgactaatttctgtatttttagtagagacagggtttcaccatgttggccaggctggtctcgaactcctgaccccaggtgatccacccgcctcgcccggacaaagtgctgggattatcatgccagcctttatcattaatttttaagaaaacctggacgggcacggtggctcacacctgtagtcctagcactttgggaggccgaggcgggcggatcacctgaggtcaagagttagagaacagcctggccaacatggtgaaaccccgtctctactaaaatacaaaaaattagcctggcatgatggtgggtgcctataattccacctactcgggaggttgagacaggagaatcacttgaacccaggagatggtggttgtggtgagccaggatcacaccactgcactctggcctgggcggctgagcgagactccatatcaggaaaaaaaaaaagaaagaaagaaaaggaaaccataatcttcgcaaaatttctgcctatgtccctcccttctccccattgggcaggggtgggggcggggactccaccatgtaccttgcacgatcatagagcctactggaaggaagaacgtaaccattgcatgatttatttttgcgcttgccgtaggtaatacatatgttgttgcttttttgtttcttgagataataatgaattaaatattaacaccatgaatatgattaatagcatgtaattttttttcttttgctgttttttcccctgctcttctcttctcctgtttttgtgcttttcctgctttttctttgtccccttcacgtcccttccatctcttttcctttgcctgctcttccctgatttacccacaaccctaactttgcatattcaaagggggagatcctggtaagtacatgcttagtgtggtagcaaacattagagaatctagtggtgatggagaccccgcccacccctaatattccctgttccccatcccctccaaataacaaaaatactaaaaatcgagctaacctggaaaccccatgccgcagccggcgctggactgcacgttgccctgggtataagtcgactcacacaggcactaactggaccgccacccttgaaggcgcacttctgcagccagttcctggcaggttttcctggtttcctgtaggtcagggatggcaaatacttacacaccgcccctgcctcccctcacatccctggctgtggaagatctcgcttaagccagaccagaattcattcttggcactgcccctcctccttctatctcctatgcagatgtcactcatggatcagagcatatttttccacatggcagaaatcttgccctcttgtgcccatggcagacatggctagttgatctagcactctttgccttgtgccgctcctctagcacacgcccatggcagacattgctaagcaatcctagcattctttccaaataagcttgccagcactcctgttctatagcagatgtggctaagtgattaaggtattgtttttctccctatatgataccctcttctctatgcatggcaggcatgactagtcaatcaggagcctctttcctagatgctgcctcttgtcctccagataaattgatgaggctcttctgttccacttaccctttctcctatccttggcctgtgacaggcaacactaattgatcctagcaccgtttcctgccacgcccagaattctcaccacagtgcttcaggtatcttgtaccagtcgattgacatggctcccgagatgaatcatatttgctgtccatccctgctgtgggtaacacctccttcctttgtgcagaaccctcagctggggcccagtgtggggcgtgagatgggcgtgaggcccagtccagcccagcccagcgggaagcagcctgctactcatagctgagaactgaacccagctcaaggagctcacctctaggcagccggcctcagcccggctcttacacttggacagcacagcctgggcctccagtcctagcaggggctcccttttgctggacattctcccactgccagccaccaaggcgctggtcatccctgccactgccctctggcggggctcttctggcaatcccagggtctttcttgtagctgagccgatcctatgccagggcctcgctgctcccagggcctgggtgtgcagatagggccatgggtggggcagtgacgggaggaattagttggcctcgggcttgtggttttcaggttcctcatgtgttccccccagtccctttgaatttgccaggccaagaccaggaacctgcttctcccttgtaccccaagaggtttaggggttcctcttttcctaccagaggccacatagcccagccccgtcatgagcgtggccgtggcctctgggtctcccatctgtggttcccatctctacccgggagactcaggccaggaccctcacccaggaaagagactggagcagcctgccagaggatccctgctttgccgccccctgcctgccctgccacccataccgccccatgtgcctgcctgcctgtcactgtgcaccctagcccgcaacggcctgccgcctcttctgtctctcccacccctacttccttctaagcccagtcccattgggatgtgtcccttggatgcaaacctgactttctgctgaggcctggctgctccctttctctggctcacaagtggtggatggctaacgggcctttgtttgccacccacagcttgcagctccctagggtgggattttgtctctgaacccgtgtggagaagggcacctcagggcttctgccagacgtcctgccccaaggcttggtgtgccatccccagcatggccccgatcagtgccctggccctgtggccatgcaccccaaagtgtagcgtgggccctgtgctccagctctgaccaacactaaccccggctggaggcaggagagccaggccaccgaggggtgtgcgggcacatccctctccttagaaaccgggccaggcctaggagtatggaggcctcacatttctctgggggagcaccgacagcctgtctccctgttttccctcacctggttgtcattcagtcatggaaccagggtctactaagcactcgttctgtgcccagctctgggctgagacaaggcagtgcccccaccccgctccccccgggtgaatggaggcattcccagactgccagacctttggtgctaacaccaggacgtcctggacagaccaggaagagctcgtcactgcgttcccagaggggatgctgtgacctcacaggggctgctggcctcagccccctcacccaccaccaggcagcccgtgaatggccagatgccaggggtcactgcctgctccaaacaactgtgagagtcctgtctgctcatcccagggagggataagtctgtacccttggccttaacaaggggcgcccggtggcatctcatgctgtccccagcctgggcagtgacttctgcatggtccaggggtccctgggtactctttagccacctccgtcttcatggccacctggggcttagcactcacatccagccaccaaggagccgctggagctgtgggctggtggccctggttcagaatgtcaggcccggggtgggtcggggtagtccggatgaagcccctccagaggaccgcccccgactaggacagcatctgggccccagagggattcctggaggccccatctctggcgctcctgccgtgccgtgccctgccatgccctgcactgggggatgcaggccagcccttcgcagctgtccatggccatgctcagcccaccctttgtagcttggccaagtctgtcagtgcctgggtcccaggccgccctgtgcgtgcctccgtgtgcttcctgcagctcccagggccctcgtcctgagtggggtggggggctctgcccacacatgcctccagcggccagggagcatgggagcacagcccccaggctgcctgccgttagttgtcaggtgagtccctgcgcaggcctgggttctgacccccacgcagatgacagctacagccacacaatccccatccatggggtctcccagcctgaaaccctgatgtgtcagtcaaaaggatgaccaccaggcttgcagccagcttgggacatgagccgcgctccttcaatgtccttggggagggcccctgggctcacacctttgaccctagccctctgtgtggatgctacccttggaaccttatctcacgcaaacaagtgcagttcctcagatgtcacatttcatgtgccacagccccacacacaagccccagggactcctcccatgggcccctttccatcaggcctctgtgagtctataccccatcagcccctggcccagtgagtctgtctgtccgcccacctgcccaggtggcgcctcatgttggtttcctgctggaaatgcttgggacagggtggaactgggtttcctgggctttggggctggaggtgtctctattgcggtccctggcttcccactgagctgtgggcaaggctgctgcgctgggggatggctggggcacggagcgaggttccctgctaagctgcgcgctttcccccaggtgatccgcaggggctggctgaccatcaacaacatcagcctgatgaaaggcggctccaaggagtactggtttgtgctgactgccgagtcactgtcctggtacaaggatgaggaggtgagtggcaggcgggagcagggctgctggggtaggtggggcagccagggaagagcgggtgggcgctccctctgggcagaactcagtcactgcgccactctgccctgagtcaccattaggactgtaactcgccgggcacggtggctcccgcctgtaatcccagcactttgggagggcgaggcaggtagatcacgaggtcgggagtttgagaccagcctggccaacatgatgaaaccccgtctctactaaaattgcaaaaattagccaggagtggtggcacgcgcctgtaatcccagctactcaggaggctgaggcaggagaatcgtttgaacccgggaggcggaggttgcagtgagccgagattgcgccactgcactccagcctgggcgagagagcgagactccatctcaaaataaacaaacaaacaaacaaaaaacaaccgtaacccagggctggagagcagccaccatgtgccaaaaggcttacattgtacctggcccccatgggaccagctcctagagtgcaaaagggagatggagggtgatggagtcactagcaggctagaaacaggccctgacctccagtgccactgtgactgccccgtgctcaagagaaggggccatgcccaagggtcaggggctcaggcatgcagccagcctccaggggcaccggggttccatcacttacacctcagtcaggccccttgcctctctgggcctcagtttttctatctgcgaagtggtctaggatggtccctgcccactgtgcggtgcttggccacagtgtgcagaacgatccccacatgctcgtcattatgggaaggaagtggagaggcccctgggtgatgactgcagggagcagtgttgagtgctgagtcatgggagggactcgttcactgcgagtgagggggcaggccttgagcaaggatactgccaaccggcctctgctctccatgctgacccagcatccctcctgatggtcctatgtagaaaaagatacataatgtttgacatatttatggggtccctgtgatgttttattagatgtacagagtatgtaatgatcacggcagagtgtttgtggtgtctgtcactttggtattcctcattttcctgtgttcagaacagttcaggtcctctcttctgactactttgaaatacacaaggctgggcacggtgcctcaggcctataatcccagcactttgggaggctgaggtgggaggatggcctgagttcaggggttcaagaccagtttgagcaacatagcattaccctgtgtctattaaaacccaaaaaaaattagctgggcatggtggtgcatacctgtagtcccagctactcaggaggctgaggtgggagggtcacttgagcccaggagatggaggctgtggtgagctatgatcacaccactgcactccagcctgggccacagagcaagacactgtctcaaaaaaaaaaaaaaagaagaagaagaagaaatagacaatacgttgttgcattgttggctgggcacagtggctcatgcctgtaatcttagcactctgggaggctgaggtgggtggatcacctggggtcaggtattcaagaccagcctggccaaacggtgaagccccttctctactaaaaatgcaaaaattagccaggtgtggtggcgcacgcttgtaatcctagttacttggggggctgaggcaggagaatcaccggaacctgggaggtggaggtggagtttgcagggagccgagatggtgccactgaactccagcctgggcgacagagtgagagactccctctcaaaaataaaaacaggctgggcgcagtggctcacgccattaatcccagcactttgggaggccaaggcagacagatcacttgaggtcgggagttcgagaccagcctgaccaacatggagaaaccccgtctctactaaaaatacaaaattaatctggcgtggtggcgcatacctgtaatcccagctactcaggaggctgaggtgggagaatcgcttgaacctgggaagcagaggttgcggtgagccaaaattgcgccattgcactccagcctgggcaacaagagtgaaagtgtgtctcaaagaaaaaaaaacaccagacaattgttgttaactatagtcttaactgcagtcaccctactcttctgttgaacaatagaagttaatgccttttctctaactgtatgtttgtacccattaaccccacctctctttaccccctacttgtccccacctttcccagcctctagtatttatccttctactctccacctctgtgagatccgctcttctaccttttatttttttagctcccacgtatgagtgacaacatgcaagatctgtctttttgtgcctggcttatttcacttaacataatgacctccagttccattcatgttgctgcaaatgacaggatctcattcttttctatggccctgatcaacccgtttcttgcttaattctcttgacgtaaccatggcttagtggcctggaagggaagccacttctgtgtgatagcttgttgctactctgatgcggtccaggttggctttcaagagtccctggcaaagagagctgtgtttttctcattgtcctggttgctctgggagaagactgcaggctgtcctgtgagccatggctgtgttatgtgggcaatggatttgcgtctgtaacagaggcccaaaatgaaggctcttaaagagatgaagtctgtttcttgctcacgtctcagtgagcttggtgaccctgtgctgcaaggctgtccagggcctggctccgcgtctcctgttgccaccttaacacagggctcccttcatagtttaaaatggctgccccatacccatcaccatgtagcctctagcagcccaagaagggaaagaagggcctctgtgtgtgggaactgtgagtccagctaacagttctagcactttctaagaaggaagtggatattggttgtttctgagcgtgacagctggggcttgacacccggaagtcaccaggatattggttgggtggtgtcaacccttcgtgtctcgtctccccacctataaagtcaggactctggcctgtcccctctggactgcgggaaccagtgggggaattctggtacttgagcccaggactgtgcctggctcactgcatgtgtcccaggttttgtcctggtaactaccagcatcaagtcctcccagctcctctctgtaggagggaacctacccacctacccccagtgcacagaggaggagctggaggctgtgtcaggtgcagggccagctggccagtccccatggtccctgggatggcacagccaccaactcagtccaggcaacctcagtggagaggctggggttgcctgaggcccctggagccgccctgcctggctctcttccccttgggtttgggggaatgctctgtaggagtgccccccactggggacttgctggcacccaacccagccccaggataggcaggactgggcttggaagtcccagacttagagagaaggcaggctggggggccccggctggccccagggagaagcaaagagaggcgggcctcttggctatggacccctgctctgtgctgggctcattggctaagagagcccactgaggccacacctgaggagaaccctactccccgtgaggaaaccctcacgcttgctattcgggtggctctgtggtcacccccatctaaggctctgagcggtgacttgccccacatcatggagcgggggagggtccccctggggtggaggcttccccagtgcacgtctgcgggcccatgctccctgacctgagggacaccccagcccgacatccgaacacctccgctgcagcccaggcctgatgtccccttgactgaggacattgggggtgaaaggatcatcccgctccacatgaggccagacgctcatctctggaatgttcctgaaacctcaggagccctgaggcttctgcgggactctggggcgctgtttctaaacccagggtggtggagtctgctgagccaccatacaagcatttctggggtccctgtggaagcttccagaacctcagatccagcgaacctcatggggttgggatgtgggaggagtgtggagccaggcgtggtctgcagccttctccccgcctcaggcacctctaggaactcacgtgtccagatcggatggctcctcaaaatggctggggtggggtagggtgccctttctctttttctcccctctttccgccttgcagtgagaaaccagcctgcgctgtggtgtgtgggctgtcaggccggctgagagctggtgccctgcctttcagttcagggctgtggggaccttccagggtcccctgggtgggaatgccaggcctggggcagcgagccttggaggagcctctgggcctgaacctcagcctggcagctctctgcctggcagcattgcaagtctagttttcagatctcctcttccttcacgtgaggggcccttcgtgtttttctcatctgagagttgaaagccagagcccccgaccctcccgtggagccccacactggagtctggagcagcagtgggagaagggccgggcgccggccgtaatgagaaacagccgacctgtgaaaggggccctgtgtgagccccagacacaaagcaggctccattcaggagggggcagccatggaacctgacccccgccaccacccaagttaggatcccagcagggacccttggagtcacacacgtggcagccacccctgaggaggaggccaccctcttagatgcctcagtgagacacaagacatcaatatctctttatttaaaaaataaacaagacatttacagccatggggtggggatggcagactgatagggccagggcctccaacccctcggccggcctcggggctccctctgcctttccccagtgcctcttctcccacccaggccctcgaatcttctatgcgaggctctgccacagtgggaaacggggtggtggaaaatgacactcacctgccggcgagtttggggggcctgtctcgacgagccgctcacccaagcccagcctaaccaatgtgcagactactgtacacattgagagcctcctgaacaggtagtctgaacactgggttggcggggccggctatccatcctgcagaaccccccaggcagacgctggggccaccaggccaggccgtgcctcagcacctctgagcagccaaggaaaccaccactcttcccgagacgatccgctctgtcccttctgacgtggcaaggctggggccggctcgcatctggagaaagttctgggttttcaggaaatcctaaagagtgggggaggcggagcaggaggcagggtttgggatcgtggcttctgggctcaggaggaatgtctgactctttgggggtcgggggtggggaggaggggcgcacacacacgtgtgtgtgtgtgtgtgcgcgcgcgcgcacgcgtgcgtgccggcagcaccaggaaggcggccactgatttctcggcggaatcgcactgtaaacagttccagatgtggcattagctggaatggcctgtgactcagttacttggccctgctggctggaagcttccggccgcgtgatatgatagggtcagggcagcaaaggcccttgggcaaacgtccgagccgggggcagggcttctgcagagccccctcccctagccccttctaaagcccccaaaactcttccccgaaaggtgggagggacccaggccctgtgttacccagccttgcctgggatgacgggtgcaggctttcttcatcaccttccctcccttgggtccgcagcggcatccctccctccatggccaccgggcccctctcctatgctctgctccctccatggccaccgggcccctctcctatgctctgctccctccatggccaccgggcccctcttcctatgctctgccctacttctttgcctagagcctggcaggctaatcctggagccgctcacaagagcaaccaaagaaaatcccgggtgctcatgggcaccagctctgcagtgggcaccaagctcctccatcctccttggatagatgaggaaactgagatgaaatgggaggtggcggggaagtggcttgcccgagggcacacggccaggaaagggcagggctggcatcacctcaaccatgctgagctcctaacgccctgaggctgagcccatgtgccaagcccactgcttcatcctggctccccttgcaaagtcctgacagtcccagctggcccccacttgccagggagcccccgctgccttctccacagtcactgtggctgctcctgaacttggaggcggcagccaggttaggctttgtgctggggcagcgcagtgaggggacatgagaggagtttccagagacggcccagggagaagaagggccaggggcactgtggggaggactgggctttgggtcacagagacctggcctctgaagtcctgctgtggcttgcgctgcctgccgtgtggccttcggcagccagcttccctctctgagctaggagggatccgtgaactgagaccaagcagtgcatggcatgggtccccaagagctgctgctgtggcgggtgggcacacacatcactgggtgagtgtgggactccagggtgccacccccagctccgtgactcgccagccccttgcccctggccgaggggcccacctctgagctgcctccctagcagtctggacagccgtggctggcacttggtgcttcctgaacagggccaaccttagaaagcaagtgatagggcaggtgcggtggtgcacacctgtaatcccagcactctgggaggctcgcttgaacccaggagtttaagaccagcctgggcaacatagcgagaccccatctctattaaaataatgataatgataataataaagaaagggagtaaggcttctgcagcacctggcccaggacctatccagccccaagatgtcctaaagcggccaaggttgaaatcccagccctgctcctctctgcctcagtcttcccctctgtaaaatggcatcacagaggtaactcactcctaggctcgtttcaaagatggagcccagataaaagttccattcacttcgtgcaaggcgaggggcagttgtgttgtgcgtgccgtcagccacatgtcagcagtgaactcaacaggagtccctgccctggagaaacttgagtcagtccagtggcagtcagccacctaggtcaataagcacaggcagtcaggcacctaggtcaacaagcgcaggatacgtgacgtgttgtgtgagggaaaaggaggatggaggtggggagggtgcgggtagagttagggcaggagggagccatgcaagtgtcaggatcaggcagtagcccggtcgtccgaaggccctggggtaggaacccaggtgggatactcagggagcatcatggagggcagcgtggctgggacagagtgacggacggggaagggccggcagatgggctcatatacagcagcgaccagcattgagaagcccccggggctggtggtggcgcatgctacacgctctggcctggggcatcctgagttgtcacgtggaccgctcagggtgactcttttccctccaccctcaggagaaagagaagaagtacatgctgcctctggacaacctcaagatccgtgatgtggagaagggcttcatgtccaacaagcacgtcttcgccatcttcaacacggagcagaggtgaggggcccaggggcctggggatggctcggggtgaagaccaatggcctcattcacactccacaaccttcactgagcactgagcacctggctgtcagcagtccctgcccttgggacccagcttttagaaaggggagtcacgtgagaaatagcaaatgccagggatgcttcccgtgctgggtcagagatgacctctctgggcagagatgaggatgaaggcaggctccgagtcagtgggagccatggagagttctgagcacagggtgaccaggacctggctcaggtgcttgcaggagccctctggtggctgagagggaaacagtatgagagggtgagagatgggggacgagggcaaaggccgctgccttgtccaagtgggcgatgatggggccagaacccatagggaaggagggtgcagattctgggtagaagagtcaggcggagccctggtgggcatggatatgagagagaaaggcaccaattgtgaccctgagtacgtgggcctgagctcctgcactgcccagctgctgccattggccgaggtggggaaggcagcggcaggtaggcctggagacagccaagagctccatttaggccatgccaagggagagggtgcatcagggaggcacctgggtagatcgaggagtgtgatgtccaggaacgagctccagtctgggatgtgaactgggcagtcaccattgcgtggatggtatttcaaggaacgaaaccagatgagctcccaggagagtgaagctggagaatgggaggccccaggaagctcacagtacatctgtcccatgaggcgtagctggagactttagcagagacactgctctcaggaagaaacccagctggcaggagggctcttcccatgctcacacaatcacgctcatccaggaagcagggcccacctgagtcagggattagctgtcagtaaaggcccggtggtaccctgagacctgtaggcaggcactgacgtcctccctgctggccccagaacctccttgcctactgcttggctacacccaccaactccagctgagtctcctggttccctcctgctttgctctggctggcctaaagctcgagacccatttgtccaccagctggccgtgaaaaccttcatagctcttctaggcttgcccctggccatatgacacctggcagctgtcccaggtccctgagccgtgtgcctcctgtacagggagggtgacaatattatctgatatatcttttaagagcaggttcaggaaacccagagtagtagctgcaaaaacaagataagatggttgatagttttttgtgtaaattaagtccagactttagtatcccgggcaaagtggagcagctccacaggcatcagggtccaggccctgcatgttcctcaggattccacctgatatgcagaagccgagctctgcggtgggacaggcctgccatgaaatcctgactttttttttaaacggagttccgctgttgttgcccaggctagagtgcaatggtgcgatctcagctcaccgcaacctctgcctcctgggttcaagcgattctcctgcctcagcctcccaagtagctggaattacaggcatgcaccaccacgcctggctaattttttatttttagtagagacggggtttctccatattggtcaggctgggctcgaactcccaacctcaggtgatccacccacctcggcctcccaaagtgctgggattacaggtgtgagctactgcacctggcccaaaaccccgacttctacttctttgtccaaaatggctgcccagactccagccattgtgatgatgtcccaggcagcagcaggaaggagaggaggagctacaagggcatgcctctccccacacaacctcatccagaggtcgttcggggcagccacttgctgaccacaaacccaactctcacttaaaggctttgtgggcagcttggctgtcttaaccacacctggatgtgggacaggaaaatgtgcgtggcatgtggcacggggcctggcctgtagaccaccatctgcaagcactgtttagcatccattccatttatctcccagctttgagaccctggttcttttttctttttctttttcttttttttttttttttgagatggagtcttcctctgtcacccacccaggctggagtgcagtggcatgatctcagctcattgtagcctccacctcccatgctcaagtgatcctcccgcctcggcctcccgagtagctgggactacaggcgcacaccaccatgcccagctaatttttgtattttctgtagagatgggggtgttgctgtgttgctcaggctggtctccaactcctgagctcaagcaatccccctgtctcagcctcccaaagtgcaggaattacaggtatgagccaccatgcctaaactttacaaaaatttttttgttttgttttgatacatagtctcactctgtcgcccaggctggagacagtggcacaatcttggctcactgcaacttccacctcccaggtttaagcgattctcctgcctcagcctcccgagtagctgggattacaggcatgcagtaccactcccagctaattttttgtattttagtattgacggggtttcaccatgttggccaggctggtctcaaactcctgacctcagttgatcctcctgcctcagcttcccaaagtgttgggattacaggcgtgagccactgtgcccagccaaaactttttttataaaaaacacacaggccgggcacgggggctcacgcctgtaatcccagcactttgggaggccgaggcaggtaggtcacgaggtcagaagatcgagatcatcctggcgaacacggtgaaaccccgtctctactaaaaatgcaaaaaattagctggggtggtggcaggtgcctgtagtcccagctactcgggaggctgaggcaggagaatggtgtgaacccgggaggcggagcttgcagtgagccaagatcgcgccactgcactccagcctgggcgacagagcaagactctgtctcaaaaacaaaacaaaacacattcgggcacagtggctcacacctgtaatctcagaactttgggaagccgaggtgggcggatcagctgaggtcaggagttcgagaccagcctgaccaacatggagaaaccccatctctactaaaaatactaaaattagccaggtgtggtggcgcatgcctgtaatcccagctactcgggaggctgaggcaggagaatcgcttgaacccgaaaggtggaggttgcggtgagccgagattgcgccattgcactccagcctggacaacaaaagcgaaactccgtctcaaaaaaaaaaaataaataataataataataataaagttctggtggacagtgctgctctgggctttcctgaaaatgccccagtgggagcttcccagccacagttggtgtcgagggtcacatgcccacctctgggggcccaggaaaagagaagagtcagctgatccaacagaaacaaagaaactcagacacttgccgagcttgtgcacagcgctcttctgtgtaggcgtcactcacggtgacccctcagcatgaccaggtgaagcctgggttgggtttgggttcctgatcagtcagaaagacccctagagcccattcctctcggcagtctgccagacccatggcagggtcaagcttgtgcccctccttccccacccccccgcagaaacgtctacaaggacctgcggcagatcgagctggcctgtgactcccaggaagacgtggacagctggaaggcctcgttcctccgagctggcgtctaccccgagaaggaccaggtgaggagccgtcctgcgcagccaggcccagagcccccacctgggagaggaagcagggctggctttccccaggacaggtcattttcaggccatgttagccaggagtctctgaaatcatgtagcagatgcccacttgagcaagcaaaggagaaattgggggtactttgtcatcagggcccagaaagttccctcacggaagccagtgaccggggcacacaggggatggggtcccacttgctttgttctcttctcttttccccttccatcctgaggtagagtgaacatggccacccttggccccaatattaaaatgccttgccgggcacggtgggtggttcgcccctgtaatcccagcactttgggaggctgaggtgggcagatcatttgagctcaggggttcgaaaccagcctggccaacatggtgaaaccccgtctctactaaaactacaaaaattagccaggcatggtggtacgtgcctgtaatcccagttactcaggaggcttaggcaggagatcgcttaaacccgggaggtagaggttgcagtgagctgagatcacgccattgcactccagcctgggcgacagagcaagactccatctcaaaaataaaataaaatgtcccaaggttgggtgtggtggcttacacctgcaatcccaacactttgggaggcaatgtgggcagatcctttgggcccaggagttcgaaaacagcctgggcaatgttgcaaaacccttctctccaaaaaatacaaacatacccaggcatggtggcgcacccctgtaatcccatctactccagggcgctgaggtgggaggatcacttgagctctccctgggaggttgaggctgcggtgaactgtgtttgtgccactgcactgcagcctgggtgacatagcaagactgtgtcaaaaaaaaacaaaacaaaaaaacaacgttccaatgcccaggtgaggggatccaccccagcatcagccagggtcaccccattgtttgggcagctctggcccagggcaagcaggcctatctggtgccagtggggctgtcaggggccagcctgaggtcagttattggtgggacaatagggcagatggtttccagagaaccaggacttggcccaggccacagtcacccctcagcacctcccctcccgcttgcaggcagaaaacgaggatggggcccaggagaacaccttctccatggacccccaactggagcggcaggtggagaccattcgcaacctggtggactcatacgtggccatcatcaacaagtccatccgcgacctcatgccaaagaccatcatgcacctcatgatcaacaatgtgagtggagaactaaaaatgagaaggaggtagctgggtgcggtggctcacgcctgtaatcccagcactttgggaggccaaggcgggcggatcacttgaggtcaggagttcaagaccagcctggccaaaacggtgaaaccccatctctactaaaaatacaaaaattaggctgggcgcggtggctcacacctgtaatcccagcactttgcgaggccaaggcgggcggatcacgagctaaggagttcgagactagactgaccaacatggtgaaaccccatctctactaaatatacaaaaattagccgggcacggtagctcacgcctgtaatcccagctactcaggaggctgaggcaggggaatcgcttgaacccaagaggcagaggttgtggtaagcctagagtgcaccactgcactccagcctgggcgacagagtgagactccgtctcaagaaaagagagagagagagagagaaaaatacaaaaagtagccgggcatggtggcgggtgcctgtaatccagctacccgggaagctgaggcaggacaattacttgaacctgggagatggagatggcagtgagccaagatcgtgccactgcactccagcctggttgacagagcgagactccatctcaaaaaaaaaaaaaaaaaaaaatgagaaggaggccaggcaccctaggccatacctgtttgtagtcttagcactttgggaggctgaggcaggaggatcacttgagcccaggaggttgaggctgcagtgagctatgatcatgccactgcactccagcctgggcgacagagcaagaccttgtgtccaacaacagcaacaacaaatttgaatgaatcaccaccctttgaacaccagaatctgcacggccatcctctttgggaaaccctagggtttccgagccacactgggtccatagtcccatcaagtccactaactggagtgaacactgcaggtgtgcgccttctctgaattaacttaggctggcatcagaataactgcaggagggagaacggccatcttccccatttcacagacagaaaacaaggccagagagatcaagtaacctgccccaagttccttaggaaagtgggaagtgggattcaaacccacgtttaccctggttgcaaccatacccttgggttgtgttgggcagccgctgtgtcctaatgatctggggcccagcctcttcctcatgggcgtcacccgcctggccccgggttccctggagactctcagggctctgggctcctcttcagtgaaatgcagctgtactgatagtatctccagctcaggctgctagagggctcagggcacttgtgtatcaggcctttggcatggcactagccactcaggaagctttataaaccagctttggggccggagcagtggctcatgcctgtaatcccagcactttgggaggctgaggagggaggatcacttgagcccaggagctgaagaccagcctgggcaacatagccataccccagtctctacaaaaaatttaaaaattagctgggcgtggtggcaaatgcctgtagtcccagctactcagaagaccgaggtaagagcatcacttgagcccaggaggttgaggctgcagtgagccatgattacgccactgctctccagcctgggtgatggagcaggaacctctttcaaaaaaaaagtgtcttgggttttgtatatgaatgtcaaccacagaaacctgcggatctaagtaaaactcccacacagggtgtggctgggcatggtggctcacatctgtactcccagcactttgggaggcttggcaggaggatcactcgatcccaggagttcaagaccagcctggacaacatagtgagaccccatccctatttaaaacacacacacacctcccacgtgccatgccctcccaccctgttgctcccattctcagtagtgatcagtgttcacagtttcatggtgtcctggtatgtttcctcatataccgataggatcggagacatatacggttcttctgctatgaaatttaaaatgcatatatcctttgaccctgcaagtttacttttaggaacttctctaagagagacaattgcccacgtgcaaagtgagcttatacatgcttattgttttccatgatgttttatagcagccaaagatgggacataattatccatttttaatagactcttataaaataaaaatattttattatttaagaaaataataaatctgtcggcccagctactcgggaagctgaggcaggaagatcacttgagcccaggagatcgaggctgcggtgagcaaagatcgctccactgcattccagcctgagtgataggagtgagaccctatctaaaaaaaaaaaaagttgtgacggccaggtgtggtggctcatgcctgtaatcccagcactttgggaggctgaggcgggcacatcacgaggtcaagagactgagaccatcctggccaacatgctgaaacccccctctactaaaaatacaaaaattagctgggcgtggtggcacgcgtctgtagtcccagctactctggaggctgaggcaggagaatcacttgaacctaggaggtggagtttgcaatgagcggagatcatgccactgtactccagcctggtgacagagggagactctgtctcaaaaaaaaagaaaaaaaaaagtaactgaaaaacttctgtatccagtaggaggttccagaaaggacaatgtataaaattcatgaacagaaactagtagtgtttgaacagaagccaggtggaagatgtaacaggattagccgggcgcagtggctcactcacgcctgtaatcccagcactttgggaggccaaggcgggtggatcacctgaggtcaggagttaaagaccagcctggccaatatggtgaaaccccatctctgctaaaaatacaaaaattagccgggggttggggggcacgcctgtagtcccagctacttgggaggttgaggcacaagaattgcttggacccaggagacgcaggttgcagtgagccaagattgcactgcagcctgggtgacagagtgagactctgtcacaaaaaaataaagatataacaggattggctgggcgcggtggctcacgcctgtaatcccagcactttgggaggctgaggcaggcggatcataaggtcaggagatcgagaccatcctggctaacagggtgaaaccctgtctctactaaaaatacaaaaaataagctgggcgtggtggcaggcgcctgtagtcccagctacttgggagactgaggcaggagaatggcataaacccgggaggcggaggttgcagtgagctgagattgcaccactgcactccaacctgggcgacagtgagactgtctcaaaaaaaaaaaagcaaaaacaaaaaagatataacaggattattctgccaaggttaaggaaataaataaataagctaaaacaggagaaaagacatcaatggaagaggcaagatactagaaataagttgaataagaatctcataaccagcctgggccacatggtggaaccctatctctaaaaaaattacaaaacttagccaagcatggtgtcaacgtgcctgtcgtcctagctacttgggaggctgaggcaggataattacttgaacccgggaggcggaggttgcagtgagctgaaattgagccactgtactccagcctgggtgacagagcaagactctttttcaaaaaagtctgggggtggccccgccctgtgagagatgtttttccagcagtcactgtgggttctgggttggggtgatacacaagcctgaccctccccaacccctgcccgcagacgaaggccttcatccaccacgagctgctggcctacctatactcctcggcagaccagagcagcctcatggaggagtcggctgaccaggcacagcggcgggacgacatgctgcgcatgtaccatgccctcaaggaggcgctcaacatcatcggtgacatcagcaccagcactgtgtccacgcctgtacccccgcctgtcgatgacacctggctccagagcgccagcagccacaggtccggaagcctggttcccctaccctcaagcattcggcctgcaggttcctgccctccctgtgtgtcctgcagggtcctggcaggaaacaggacacagcccaagggtggcacccagggctgggcactgtgggagctgctgccctgctgaggccggaggagggagagaaggggtatgggggcgagccagccctacagctctagggcaggaccctgtgaataaataccccgcctgccctctgctggtgccttccattggcacagcccaaatggaagctggggtaagaggctggaggggcagcagccacaggagagagatgagcctcctggagcacagagaagggcagatgggaggctctggaggggcaaacgcaaggcgtggccagagctgctgccgcccctgagttgtccattgaggccgtcgggcagggaacctcagagggggctgccttgcagagccctgggggagccatggagttccttaaggggaggatatcgcacccaggcctgcaggtggcagggactgaggcccaggagggaatctggatgtctggacagggcttgcaggttccacggcccctagagatattagggcttgatctggaggactctggaagtgtctttggctgtgagggtggatcccaggcccaaggcctgagggggccctgtgagtgggaagtgcctgagggggccgagggcaagggaaggtgggactggcgctcaggttggggtgggaggatcccactgcgcctgcgctgtccccatagccagcccccacctcaggttctggcagccacagtggcatggcgggggctcctactccatctgtatctgtagctcacaccctctccttcctcacagccccactccacagcgccgaccggtgtccagcatacacccccctggccggcccccagcagtgaggggccccactccagggccccccctgattcctgttcccgtgggggcagcagcctccttctcggcgcccccaatcccatcccggcctggaccccagagcgtgtttgccaacagtgacctcttcccagccccgcctcagatcccatctcggccagttcggatccccccagggattcccccaggagtgcccaggtaaggccaaccccctgccctccaccccaactgcctgcaccctggggtctctcctcctgtctcacttcctcccagtgagctctcactacgtgcccagctgctggagtggaggaatcgtcctcatccctatttggcttgcgaggaaacaggcccagagaggccaagaggcttgttcagtgtcacagagtagcggagccctggtgactccggggctcccagcttgccctctgcctactggggtgtgccaccaggcagctggggaaccctcacactgggcacctcctcccactgtttaccttcttctccttcctgctcctgcctgcctcaacctaccgtgggccaggctttattctccccacttctccggtggggaagctgaggcccagggagggcagggggctcactgagggtcaaacagcaggcgagttgatgcctaggtttggcactcctgcccgacaccctggtggcttgcggaggtcagcctgggaacaccctggggtggtgtgtgggtgggggctgggtcctcaacccaggcctgcctcttgctcccggcctcactgccgtctccccctccccacctgtctttattctctttgcagcagaagaccccctgctgcgcccagccggcccaccattatccgcccagccgagccatccctgctcgactaggcctcgaggggggcgtgctctcgggggggcctcacgcacccgcggcgcaggagcttcagtggtctggggccctccgccgcccctatgctgggaccaggctcccagtgggcagccctggcctcttccttaacgctggccccggtccagggccggcccctgtgcctggctggacaccgcactgcgcaaaggggccctggagctccaggcagggggcgctggggtgttgcactttgggggatggagtctcagggtggcagaggggggaccagaacccttgacaccatcctgaatgaggggtccagcctgggggggactctaccaaggtcttcttgggctgggaaagcccatgtagggcaggccttctataagtgcgggcaccaagggcgcctacatccccaggccttgctggggtgcaggggtatatcaacttcccattagcaggagctccccagcggcaagcctggcccagtgggctcggtagtgcccagctggcaggcctgaggtgtacatagtccttcccggccatattaaccacacagcctgagcctggcccagcctcggctgccagaggtgcctttgctaggcccggagccgttggcccgggccggccttgccctattcctctcctcctcctcctcctgggtcccccagggtggctgggcttgggctatgtgggtggtggtggcggggggtcttgggggcctctcagctcccgcccatgcctccctgatgggtgggcccagggcggcctctctctgaggagacctcacccactcctcgctcagtttgaccactgtaagtgcctgcactctgtattctattaataaactaaaataaagggaagacgctgctggtggctgctgtgtgggcctcttgtgttagtgttcaggctggggacatgggtgccacctccatcaggcctcccataaggatgcccaagtccctgcactcataagtgcctcccatctccctgagggctctgctttcgggggtgtcacctttcagaggaagccactcgatacaggggagagcttttactttccttagcatgtgaggagtgggagcagatattctctgaccccctgcacacccccacgtgcacaggcctggctgctgcctggtgaagcggggaccccagcgctccacccccttcctaccctcaggccctgcttctctcacctcgtggggaagcccaagcctcgtggcccaactggggctcagttaaactttgctttctgatttttctcttgtgccaggcgaccacctccatcggctcccgcacgacctttcttctgagcttcgtgggaggcccctcccacctgtctggctgccccctcgggggccggtctgtcctggctggtgtccctgagccccaatcagcaggctcttgtgattttctgaccataatttattgactccaatgcccaggccacaccaccctttgttataggaggcttctgcctagactttggccgggccatccctcatgcctgtgtggggcccctgcaggagaggggccggggcaggtggtcttccaggcccccttcctggcattctgttaccagacctcaacctggcttggagggcccaggtttccttgttaggccctgccccgcaccaggcaacgctaacacaggatgggaggcttaggctaaggcacatttacagtagaggggccaggaaatccgaggctcacgttccaacgctgcagtgcccaccatgtgagatttccaggaccgtcggtgcagccactgagccgtcccttctacaagccagaggtgttccctgcccgctgaggacggaaggagactcatggggccagaccgcaggccctgactgcacactcccgttttggcaggaaactaaaattggggagggacccccaagtctcatatgcacacaccctgctgcccctcctttgtcccgttcttccttccatggcaggggctacgtgggcaccgggcgcttgtcctggaagaagcgcttgagcgtgcagacctgcagcacagccaccagcagcagcaccgccacgttgacagctgaccagaagttgacccgctccaagttgccctcttgcaggttgcggtcacgtgcctcgaaggcccgcagtagcgtgagcatctggatgctgcgctccagccgggtccgcatggtctcaatggactcctacagggcagcgggaggggaagggtcaggcctccctccacccatcagggagcagagaccaaaaaaaccgggggatacggagggaggctgtattaaccctgggaggtacagctgcaaacacagacttgttcaggctaagttcaaatcctcaccctgccactcactggctgtgaccatgagcaacttaattaacctatctgagcctgtttcctcttctataagcttccaaattgctgtgaacatttaatgcctaaataaatgtacaaggatgagcatggtggctcatgcctataatcctagcactttggaaggctgaggtgggaggatcgcttgagcccaggagtttgagaccagcctgggctacatggcaaaaccccatctctacaaaaaattagccaggggtggtgatgtgcaactgcaatcccagctactcaggaggctgaagcaagattacacctgtaatccaaacacaggaggatcacttaaacccaggagttcaagaccaccctagccaacatggtgaaacctcgtctctacagaaaacaaaaaattaggcatggtggtgcacacccgtagtcccactgaggtggcaggattgcttgagcccaggagtttgaggctgcaatgggctatgatcacaccactgcactccagcctgagtgacacagcaagaccttgcctcgccgtagctcacacctgtaatcccagagctttgggaagccaaggcagacagatcccctgaggtcaggagttcgagaccagcctggccaacatggtgaaaccctgtctctactaaaaatacaaaaattagtcagtcaggcgtggtggcacagctattcaggaggctgaggcaggagaattggctgaacctgggaggcagaggttgcagtgagctgagatcgtgccactgcaatccagcctgggtgaccaagagagatctgttagaaaataaataaataagtagttaattaaaatactaataaatgtacagaacatatttgcttgtggttaagagcatagttgctgaaaccagcatgggttcaataccaactctgctagttggtctgtgtggccgtgagttgctcagccatcttgtatctcactttctccacctgtaaaatggggatgacttgagcacagggtctgcttcacaaggtggtttggagatttacggtatgagttatttatgatatgagttccttaaacctttacaccagggtttatacctagaaatgaactacttttttttttttttttttttttgagacggagttttgctcttattgcccaggctggagtgcaatggtgcgatctcggctcactgcaacctctgcctcccaggttcaacttccacctcctgggttcaagtcattctctggcctcagcctcctgagtagctgggattacagacgcccgccaccacacccggctaatttttgtatttttagtagagacggggtttcaccatgttggccaggctggtctcaaaactcctgacctcaggtgatccacccgcctcagcctcccaaagtgctgggattacaggcgtgagccaccgtgcccggcctgaaatgaactacttattttaagagctgctactcttactataattcagttggagggcacaactacggaggggaggctgggtcagcccaaggggggcaccccaggtgaatcctagagatctggaaggagtggccccagcgcagcctggacacaccttgatgtcctccattttaacatccagcatctcctcgggctccacagcctctgcccatccttcgacctcctcgtcatcctggaggctgtcaaagatcagttcaaagaacaccagcttctcggagatggtgctgaaggagttgtcaaagcacagcttgtagtccccggcctccgttggctccaccctgggcagacagacacacagacatgacccagggtggccagccagccgactcagcggggcagtcagggcggtaacctgaggccgcctgggaagggcagggctgtaactgaacccaggcaggcatcaagactgaactcacgtgtgtaccccatcagccttgcgggactcgctgaccaacagcacgccctgagggctctccagcgtgaagtccacgtccagtccagcacctccgatcacctggggggcaggtaagagcgggtggagggctagcggtaggccaagggcgcctgccgaagagggctacggctgaaccaacactgatcaatacagaccaccaagggcttacctgaacggcggcacacccacacccgccccaacctgtcccagtggctgcgccccttgcctccaccctcattgatatgacagcttggggtccatactttcagctgaccacgcacctaccaaaagtacttaatggacgtttacctgaccacgcccctggttggctccgcctccgaaagaggataggcccagcctttttccttagtctaacccccgagaaaggcctgtgtgggcaacgcccccgcagttgacctatcagcactatcgccacgcccaccagccagagtcctgtcctctcagaggctccctatacttatcgatggccccgccccctctggatctcttactctagccccgcctgcttcattactccctccccttccgctcccacacaccgtccccgccccatctgtccatctctttctagctccgcccccgcgctcccaagcacggattcctcccccttcctcctaaagcgcgcctcgcctcgaccgcttggccacgccccctctccctgactctgctggccgcccagcccgcgaccctctacctggtattcggtctcgaggcttgcgttggccggcgcggactggtagaaacactgcttcctccccgccggcaacaggaacgtgaactcaccgtcctggattggcgggggccccgcccctcccacctccactggtggcattagtagccacaaggccagggctagggccgcgccggccgccatcatccgggtcaccctctggtctgcaaaggggtcgcggctcctttaagcgctagccctgccccggtgctactcggcggagctcattggcagtggcttctgtatgttgtccgtaaccagaggtgccaggagtgaaggacccccccactagagggcaggcggcccgaatgaatgcctgatgtgcccagaaacactcaaccgtctgggaatatttttctcaaaggcttcggctctcttctcggccgctggtggaggaaaattacaaaaataagtgccatgatggcgcatcttttgtaggcagtagctaagacaactaaagttacaggcggcagggtcctttttagtcacctccacgtggttttcccagagtgcgccgcgcgtgacaacctttggcgggaccgacgtggtggagtggacccaaaaatagcgtctaggcgtggccctgtacgcgacccgtagggctcgcctataaaagggctggggcggggcggagatacctgtggcgtcgtgttttgcttgctctgtgagcgtggtccaggttcgacgccttttgcgccttagaggcatcagcgtatcagtttcctcgtaagtcgggagtgatggaacgaccaccctgtagtgcggctgtgagaattgagatgaggcttggttcatattgagtgctcagctttcctggcttatagacagtggaggggcgtggccccaccatgcaccccaagggtctcagactcaagggccagcaggtaaatagagccattacagtagcctcgggtcagaaaaacgacagcccaggtaggaagagataaggacagtgtgggactgggagccacgttgcctggttcagctcctgccccacccattacttgaggcattccctctgttgagcctcagtttcctcttctgcaaaatggggataataggcctacgctactgggctgtctttaggatacgtgaaatgcttgttgagtgcttgcttccgcagtgcgtgggacatcacaggccctcagtaaataataatctgttatttggttcccgtctaaacataaactgtgtacagggagatgtttagtcttcaaagataaacccggaaaaggttggcaggtgatgacaaagatccctcaaatacagctggctgttgtcagcactttcctgcatttggagaatttggggaagtagctctttgtaatatcagtttggtattccttttcactccaactttttctatcatttacactcactgcttggacaatttgaagtaacagtggagaacgggtgactccttttcttttttttctttttttttttaatttttttttcctttttttttttttttttttttgagacagagtctccctctgttgcccaggctagagtgcagtggcgcgatctcgactcactgcaacctccgtctcctggggttccagcgatcctcctgcctcagccttccgagtagctgagactacaggcacgtgccaccacacctggctaattttttgtatttttagtagagagggggtttcaccatgttagccaggatggtctcgatatcctgaccttctgttccatccacctcggcctcccaaagtgctgggattgtaggcgtgagccactgcacccggccggattttttttaggacagggtcttgctctgttgcccaggctggggtgcagtgacgccatcatggctcactgcaatctctacctcctgggctcaagtgattctcccacctcagcctcctgagtagctgggactacaggtgtacacctccatgcctaactaattttttgtagacatgaggtttccctgtgttgcccaggctggtttcaaactcctgggctcaagccatctgcctgctccctcaccctcccaaagtgttgggattactaaaattgatttttttaaatacagtaaaattcacattgcataaaattaacaattttaaggccgggtgtggtggcttacacctgtaatcccaacacttttggaggccaaggcaggcggatcatgaggtcaggagatcgagactatcctggctaacacagtgaaaccccgtctctaccaaaaatacaaaaaattagccaggcgtggtggcgggtgcctgtagtcccagctactctggaggctgaggcaggagaatggtgtgaacctgggaagcggagcttgcagtgagcccagatgatgccactgcactccagcctgggcgacagagcaggactccgtgtcaaaaagaaaataaaaataaccattttaaaattaacaattcagtggcatttagtacattccagtgttgtgcagtgacttctatgtagttccaaaacattttcatcggctcagtaaagatccctgtacccattaagcagtgattctgaaacggcctcgttgtcttgagtaacacccggggtcgttgtctcacagccacgaagaacaaggaccaggacacacaaaagaatgaggttgagaacgaacgtttaataggcaacggagagtatagctctctgctacagagaggagtcccagaaaaatgggttgctggtccatagcaaaatacaggggggtttatagatgagctggtgaggagacttagcctgatttacataggggatgaaaaactggttagaacaggtgtgccatttgcatagggtgtgaatttctggtatctgctaatcttttattatgcagccggggtctctacctgagctgtgccacatcgcccatttctttttctttttttttcttttttttttttgagacagagtcttgccctgtcacccaggctggagtgcagtggcgtgacctaggctctccgcaacctccgcctcccaggttcaagggattctcccgcctcagtagctgggattacaggtgcctgccaccacgcccaactaattttttgtatttttagtagagacaggatttcaccatgttgtccaggctgatcttgaactcctgacctcatgatccgcccaccttggcctcccaaagtgctgggattactggtgtgagccaccttgaccagccccatgttgcccatttcttagttcctgtacacgtggtagcaaaaaaggggagatggagcctccgtgttggatatgcctggctcccaggtagccattttctgttggtgcagctgccagcattcccacgtgcaagcttccagcttccttatctatgtttgcagcttgagttttcaggctgctatttattagaaaagaaatgatatcaggggctactttctgttagaaaagaaattctgctgaggactctttgccctcactgcctgcctaaatactttctatctcctgtatcaactcctcattacactttgccccccgcctctcaactagctatgtgctttttgcctctagggatttacctactctggatatttcatatgaatagaagcagacaatgtgtcaccatttgtattgaacttcttttacttagcatgtttctagggttagaccatgtatcaatatttaattcctttttatggctgagtagtattctattgtatgtacataccacaatcaatttttcttttgttctttttttttttttttttgagacagtctcgctgtgttactcaagctggagtgcagtggtgtgatcacagctcaccgcaccctccacttcccgaactcatgtgatccacctcagcctcccaagtagctgggactacaggtgcacgccaccacacctggctaattatttttctgtggagacaagaggtctccctgtgttacccagactggtctttaactcctgggcttaagtgattctcctgcctcagtgcccaaagcgctgagattacagttgtgagtcactgtgcctggccccacaatttctttagccattcattattgagggacagtagagttatttcaaccttttagctattgtgagtacagctgctgttaacatgtatgtatgtgtattttattacttgcgttcagttctttggggtatagatctcgtggtggaattgctggatcctatggtatttctatgtttaactttttgaggaacaaccaaagtgttttccacagtggctgtactgttttccattcccaccaaccacgtatgagggttccagtttctctacatcctcaccaacacttgttactttgcattttgttttttgttttgttttgtttttgagacagtctcactccttcactttggctggagtgcagtaactgcaatctccatctcccaagttcaagtaattctcctgcctcagcctcccaagtagctgggattacaggcacatgccaacacacccagctaatttttgtaattataataaagacagatttttgtttttgtttttgtttttgttttgttttgttttgagacggagtcttgctgtattgccaggctggagtacagtggtaccatcttggctcacttcaacctctgcctcccaggttcaagtgattcttctgcctcagcctcctgagtaggtgggactatgggcgcatgccaccatgcccagctaatttttgtatttttagtagagacgtggtttcaccatgttggccaggatggtctcaatctcttgacctcgtgatctgcctgcctcagcctcccaaagttctgggattacaggcgtaagccaccgcgcccagcctagagacaggtttttgccatgttgaccaagctggtctcgaactcctgacctcaagtgatctgcccacctcggcctcctaaagtgctgggattacaggcgtgggccactgtgaccggccctgttttgtattttttgtttgtttgtttgtttgtttattatagccaacctagtgtatgtgcatttcccaaatgattagtaaggttgagcatcttcttatctgcttctcggtggtgtgtatatcttctttggaaaggtatccattcatgtcttttgcccatttaaaaattgggttgttcatctttttgttgtaggaggttttttaaacacatattatagagaggaaaagatagaaaagtgaaacaaaaaaacttctctagctggaccctcatgcttgtaatcccagcactttggaaggctgaagccagaggatctcttgagccaaggagtttgagaccagccttggcaacgtagagagactctcccgctcctaccaccatctttacaaaataataaaatattagccagttgtggtggcatgcacctatagtcctagctactcaggaggcagaggtgggaggctcgcttgagcccaggagttcaaggctgcagtgagccatgattggcccactacactccagcctgggtgacagtgagaccctgtctcataaacacacacaaaaaaataccctctcgcggccgggcacagtggctcacgcctgtaatcccagcactttgggaggccgaggtgggtagatcacaaggtcaggagatcgagaccatgtcccttgagtaaacaaaaccaaaaactctcctccctaattattcaccaaatatttactgagcctctgacagtgaataaaacagacactgtcaaagccaggtggagtggctcacgcctgtaatcccagcattttgggcggccaagttgggaggatctcttgagcccaggagttcccgactagcctgggcagcatagtgagatcccatctccacaaaaacattttttaaaaaattagctgggcatgggaacaatcccatttcctgagggaatgggaggatctgtctacttttcttatcctgattcaaatggaatgccagtgtggcaactcctaggatttgtcacgaatgggaagccaagtgccatcttcaaaatttcaggtcttaaatctggagaaggaagccaacatccttttggagccatgaatattgtccgaactccatctgttgctcagattggaatttcagtggaattattggacagtatggctcagcagactcccgtaggtaatgctgctgtatcctcagttgactcattcactcaggcccagatgacaccaagcccatctgaaatgttcattccggcaaatgtggttctgaaatggtatgaaaactttcagtgatgactaccacagaaccatctcttggaaaacataatttgaataaaatacttttttttttttttgagacggagtctcactctgtcacccaggctggagtgcagtggcgcgaccttggctcactgcaagctccgcctcccgggttcacaccattctcctgcctcagcctcccgagtagctgggactacaggtgcccgccaccatgcctggctaattttttgtatttttagtagagatgggttttcaccgtgttagtcaggatggtcttgttctcctgacctcgtgatccgtcggccttggcctcccaaagtgctgggattacaggcgtgagccactgcgcctggctaaaataatttttaatggaaaaaaaaaaagtagctgggcatggtggcacacgcctgtagtcccagcaacacaggaacctgactcaggaggatcgcttgagcccaggaggttgaggctgcagtgagccatgattgcactactgcactccaacctgtgcaacagagagagaccctgtctcaaaaaaaaaaaccagaattccaggttgtagattccttcaccatattgactcaggatttttcttagccactttgccagccggggacatctatggccggcagtgccccctaccacccgcaagggcatgacactggaggcaccctgcccactcagcccacctgtgttatagcttgtatctgcattcggcagttctcaagctcttgtcctgcatccaagaagaatgaggaaatgctgacaattgaagggtgaagatgggaggagaatttttttgagcgacagaacagctctcagcaaagaggagatgtgggggtgtggtttatctttcagtgtggctggatccggggctttttatggactcagaatggggaatgtgtgctgattggattgtgagtgtgcaaaaaaggttaaagcgaagacaccactcaaaggtgggtccaacagtatagaaaaccaattaggaaagggtaggtatatgcaaactaggtggagggtggggatcaatctgaggaaagcacgccaaatagaagacagattctctgtccagtccctggatttgacttgtagctttgctttcaggctttaaactgtctttggcttggaggtggggtttcaccagggacctgcccctatctgcctaggcatttgtctgcctcttgccactatcaatatcaatcagaaggcttccctgaccctgctgtagctgggttgagccccctcggccactgcctctgttactgcacttcaccactggactctccttgtcttcttgtctgactcttgaacgctgagctccttgaggacaggagccattttcattcatcctaatgtctctggcacaattctgggaacatgatgatgctcagtactcagttggtggaaaaaataagccaggaatctctcttaactccatctcctgtacacccagtatacagccacagaagtggcttgaatggatgttttttttcgctgtcaggtcagatgattgagaaatatttatgatgtgccaagcatggtgggagacacgggacactgcaggtaacaacacagaccccatccttgtgctccgagaggaggaggaaagctgtgttaagatatcatgaaggctgggcatggcggctcatgcctataattccaacacttcgggaggtgggcggatcattcgaggtcaggagttcaaaaccagattggccaacatggtgaaatcctgtctctactaaaaatccaaaaattagccagccgtagtggtgcatgcctgtaatcccagctactcaggaggctgaggcaggagaatcacttaaacccggaagatggaggttgcagtgcagccgagattgcgccactgcactccagccggggcgacaaagtgagaccatgtctaaaaaaaaaaaaggctggacacggtggctcacgcctgtaatcccagcactttgggaggctgaggtgggtagattacgaggtcaggagttcaagaccagcctgaccaacatggtgaaaccctgtctctactaaaaatacaaaaattagccaggcatggtggcacacgtgtaatccccgctactcaggaagctgaggcaggagaatcgcttgaacccaggaggtggagtttgcagtgagatgagatcgcaccacttcactccagcctgggtaacagagtgagactccgtctcaaaaaaaaaaaaaaaaaaatttaaaaagctaggcgtggtggctcacgcctgtaaccccagcactttgggaggccaaggtgggaggattgcttgagctcaggagttcatgaccagcctgagcaacatagcaagaccctgtctctgtttaaaaaaaaaaaagaaaggccgggtgcagtggctcacgcctgtaatcccagcactttgggaggctgaggcgggcagatcacaaggtcaggtgatcaagaccatcctggctaacacagtgaaatcccgtctctactaaaaaatacaaaaaattagccgggcgtggtggcggttgcctgtagtcccagctactcgggagactgaggcaggagaatggcgtgaacccaggaggtggagcttgcagtgagccgagattgcgccactgcactccagcctgggcgacagagcgagattccatctcaaaaaaaaaaaaaaaaaatgaaggaggctgggcgtggtggtggcttacgcctgtaatcccagcactttgggagcccaaggtgggaggattacttgagcccaggagtttgagaccagctaggcaatgtagtgagaccctttctctacaaaaaaaaaaaaaaaatttagccaggtgccgtgcatgcctgtggtcccagctacttggaaggctgaggtgggaggatcacttgagcctgagagatggagactgcagtgagccatgattataccactgcactccagcagcctgggcaagaaagcaagaccttgtctccaaaaaaaaaaaaaggcatgaggatgaattcaataaattcaagaatattctgtgtactaccttgaccaaattgtattaatatttagagaatattataccaaacaactacaccgtgtacttgaatttctagcgtacgtacaatgtggatcgagataccctgcaccattctaaaaagtcagtacatttcaaagtattgaaattatatgaccacaaaggagttaaaaatcattaacagtaagctgccccccaaaaagcccaagtacttgggcattaagcaacacacatattctctggatcatagaaaagaaagcacaatggaaataagcaaatatttctaacttaatgacgctcaatatatgaaaatgtgtggcatgcagttaaaacagttcttggagggaaaggtgtacctttaaatgcttgtattagaagataaaggtgggccgggtgcggtggctcacgcctgtaatcccagcactttgggaggccgaggcaggtggatcatgaggtcaggagatcgagaccatcctggctaacatggtgaaaccccatctccactaaaaatacaaaaaattagccatgcatggtggtgggtgcctgtagtcccagctactcaggagtctgaggcaggagaatggcgtgaacctgggaggcagagcttgcagtgagccgagatcacgccattgcactccagcctgggcgacagagcaagactccgtcaaaaaaaaaaaaaaaaaagagggtttaaagttaatgagctgcctgtaatcccagcactttgggaggctgagtcaggaggattgcttgagcccaggagttcaagatcaggctgggtaacataataggaccctgtctctacaatttttttttttttaattagccaggtgtggtggtggacacctgtagtcccagctactcaggaggctgagatgggatgatctcttgagcccagcagggtgaggctgcagtgagtcatgatcatgctgcttcactgtagcctgagcaatagagcaagaccctgtctcaaaaaaaaaatgtttttttgttgttttttttttgagacagagtctcgctctgttgcccaggctggagtgcagtggcatgatctcagctcactgcaagctctccttcccgggttcacgccattctccagcctcagcctcccgagtagctgggactacaggcacccactaccacatctggctaattaaaaaaaatttttttttaataaaaagagtttatataagcatccatcttaagaagctattaatacaaatttctgctggtgaagtttaaatttaaaaacaaaacatgagctaggaaaagaagagccaattgaacataaggtaaccagaaaaaagaaaagaataaagtcaagtcaaaaggcaataaaatagaaaataaaacaacaaatccaaactgtggcactttgaaaagatcaataacaatgattagctcctaggaagaccgataagagacaaggagacttcactaatttatgtgtcaggaatgaaagaaggaacatcactacagaccctacagacattaaaaggatagtaaggggatataaataactttacaccaatacatttgacaactctgatgaaatgagcaaattccttgaagatacaagcatgccaattgcaataaaggaatattacagggcactgtgggagaatttagctaggggattgttctaagtccagaggggcctggaaagttttcccagaagtgctatttaaactgagacctgaaggagaagcaggatttgaccaggttgacagaattgtgttccaggccagggaaatagtgtgtgcaaaggccctgaggttggattgaactttctgtgtccaaagaaaaaagtttactctaatgacgcattttggtgtttgatgaccacatgccacatccttcttgggtccaaacccccaagcaaacctgactggcttgaacagaaatgtttaaaaagataaatgcaaacccagtagtaagagaaacttggaagtttctgggctgtaaacaggaggcagtttatcctgtgaactatatcacaaactatatccagaattgatctggaactggtattccctttcatgtggctgatcaaacttctgagtctttttcctccctgtaactttaccttgtgagcatgcactacccactaggcgttgcatttcctactacaagttctttgaatctaatgtccactgctctttttttttttttttttttttgagatggaatttcactcttgttgcccaggctggagtgcaatggcgcgatctcaactcaccacaatctccatctcctgggttcaagtgattctcctgcctcagcctcccgagtagctgggattacaggcgtgtgccaccacgcccggctaattttttgtatatagtagagacggggtttcaccacgttggcctggtctcgaactcctgacctcaggtgatctgcccacctcagcctcccaaagtgctgggattacaggcgtgagccaccacgtctggcctaatgtctactactcttagccccattctgcagagcagtatactgaagcctcaaaggaggtaagccatgcctgaggtcacagaggccaagccctaaccaccatgtcctcccactcctgcccatatttgtttaaatgttggtgctggttaggctatggtttgtgtcttgggcatgggtttccaaacatcccactgctgtcaccctgtctcattcccaggagttctcttagaaggagagacaaaaggctgggcacggtggctcacgcctgaaatcccagcactttgggaggctggggcgggcagataatgaggtcaagagatcgagaccatcctggccaacacagcaaaaccccgtctctactaaaaatacaaaaattagctgtgcatgatggctcctgcctgtagtcccagctactcaggaggctgaggcaggagaatcactcgaacctgggaggtggaggctgcagtgagccgagatcgctccactgcactccagcctgggcaacagagcaagactctgtctcaaaaaataaaaataaaaaaagaggaaaaaattgtgaaaaccacctaaacatctcatccatttttttcccctctaatctgcagaaccgcaaccagagaggtgcgcgggtctgatgtgtgtttggggaaggggtggggaggggagagagtccctttcagtgcccaagcctgtgtgtgcaacttcctgccagtgaggaaactctcagctcgagaatcagccctggttctcctttccccgatctggcctcacaggaggagttggcggggagccttgggcccctctggcctcagccggatttcccagccaaacgcagagagagatgccctggaccatcttgctctttgcagctggtgagtctgaagcccccctctcagatcccccacgcctttccccccatcctctgtccaccttgccgctccaggggcagaaaccagtgcaggggctgccgttctcagggcatcgaggaggctgagcccttggcagatgggttttccccctgagccttggaaactctccagtagtgttggttttttcttcttaggctcctcatcacccccaagtttatgaatatcagaaatatcacccctctggagtcagctgtgcccacaccccatgattcagccccgcttcgtctctgaaggctccttgagtgctggggcagcaggagggtctacctagggggatatcagtgtggcaggggtgggtgggggttggaggctggacgagggagggtttgtatagacctcacctggccagacactctgctcagaagcctgtgggcaatcaggagagagatggatccccaggagaccatcctgcaggaagccgtgctccaaaatccgtattcttcacccaagcctgggaaaggagataaaagtcctctgcccttccttctcctgccctccctctcactcaccccctccccttcctgccacccacctcactcaccccctccctcctgccatgatggcctccttgctgctccttttttaatatttatttttatttttaaatagagacagggtctcactgtgttctccaggctagtctcaaattcctgggctcaagcagtcctcccaccttggcctcccaaagtgctgggattacaggcgtgagccactgcatcaggtgtttgctcctccttaaacacccccattccccttccatcccctggacctttgcctatgctgttccctctgttggaatgcccttccccagctctccaaatgggtccttcctcaccactcaggactcagctcgtgggaggccaaggtgggaggatcacttgaggtgaggatctgggcaacatagtgagatcccatctctacacaaaataagcaaaattagctagccaggttcaccagcctggccaacatggtgaaaccccgtctctactaaaaatataaaaattagccaggcatggtggcacatagtcccaggtactcaggaggctgaggccactgtactccagcctgggcgacaaagcaagattttgtctctaaataaataaataaagtaataataaattaaataaaaaataagagtatagttgtgttgctatgtaataaccaatgctattattgaaaactgatggccaggcatggtagctcacgcctataatcccagcactttgggaggccgaggtggggggagtcacacgaggccaggagttcgagaccagtctggccaatatagtgaaaccccatctctactaaaaatataaaaattggccaggcatagtgccacatgcctgtaatcctagctacttgggaggctggagaatcacttgaacccgggaggtggaggctgtagtgagccgagatcacaccactacattccatcctgggtggcagagtgagactccgactcacaaaaaaaagaaaaaagaaaagtaattcaactacagggagccgtcaccatgtgccaggcagtgtggggtagggtcactagcctcctgactcacagaaaacacaaggctgagggagggtggtctacttgcccgaggccacatagccagggcagcctccactctcaccacgcacccacccaccttaccctctgcattgcaggctccttggcgatcccagcaccatccatccggctggtgcccccgtacccaagcagccaagaggaccccatccacatcgcatgcatggcccctgggaacttcccgggggcgaatttcacactgtatcgaggggggcaggtggtccagctcctgcaggcccccacggaccagcgcggggtgacatttaacctgagcggcggcagcagcaaggctccagggggacccttccactgccagtatggagtgttaggtgagctcaaccagtcccagctgtcagacctcagcgagcccgtgaacgtctccttcccaggtaaggcccttctatgggatctcactgccgggggcttaattttctcacatggacctcttgtgtgtactgttgactcagaggccttcccagaaaaagccaggcttacaccctgccaggacttactcgcctttcctttttcaatcttctcagccagcccaaaaggggatttgttggttcactgagcttaagtcagctcacagggccgacttcaggtatggctagatccaggtgctgaaagctgtcagggaccatttgccccatctctgctccacattcttctccgtcttattgtcaggcagcccgtctccctcttggtgccaaaattggtgctgtgattcttcccattttgcagataaggaaactgaggcacaggaggtacacaccttgtacacaggtaacaggtagccagtctgggatgccattgccttccaaaaaccatgaattacacctccgtgacatacattacttcccctcttggccacatactttttttgtttgtttgctttgagatagttatgctcttgttgcccaggctggagtgcagtggcacgatcttggctcactgcagcctctgcctcctggttcaagcgattcttctgcctcagcctcctgagtatctgggattacaggtgtgtgccaccatgcccggctaatttttgtatttttagtaaagacaggatttcaccatgttggccaggccagtctcgaacccctgacctcatgatccgcctacctcagcctcccaaagtgctggaattacaggcatgagccactgcacctggcttttttttttttttaaatgagacaaggtcgtgcagactagagggcaatggcacaatcatagctcacttcatcctccaattcctatcctcaagtgatcctcccacctcagcctcctaagtagctgagactacaggtgtgcaccaccatgcccagctaatttaaaaaattattttagagatgagggtctaaaatgttgaccagggccggacatggtagctcatgcttgtaatcccagtactttgggaagctgaggtaggtggatcacctgaggtcagagcttaagaccagcctggccaacatggtgaaaccctatgtctattaaaaatacaaaaaataggctgggcgtggtggctcacgcctgtaatcccagcactttgggaggccgaggcgggtggatcatgaggtcaggagattgagaccatcctggctaacaaggtgaaaccccgtctctactaaaaatacaaaaaattagccgggcgcggtggcgggcacctgtagtcccagctactcgggaggctgaggcaggagaatggcgtgaacccgggaagcagagcttgcagtgagccgagattgcgccactgcagtccgcagtccggcctgggcgacagagcgagactccgtctcaaaaaaaaaaaaaaaaaaaatacaaaaaatagctgggtgtggtggcatgcgtgtgtaatcccagctactcaggaggctgaggcaggaggatcatttgaatctgggaggcggaggttacagtgagccaagacagtgccattgcactccagcatgggtgacagagcaagattctgtctcaaaaaaaaaaaagatattgaccaggctagtcttgaactcttaacctcaagtgatcctcccacctcggcctccagagtagctgggattacagatgtgagtcaccatgcccagcatgagccacataaggtttctgagcacttactatggaccaagaactgtctttgggcttgcccaaagacattccaggctgacattccaggcggatgaggacagatgataaacatgaaatccaatatatattcaacctgccagcagggcaccagatgaaatccacctgggtgaggatgtcattatttgaagtagagtagggcgactggccccatgttctaatggtcagccctctggactctgaagtagagtagggcaatcagggaagccctctctgaggaggtggcatttgagcaaaaaactgaatgatgaggaggagccaatcatgtggatatccagggcatgtgttgcaggcagaggatacaggatgtgcaaaggccccgaggctgaagcttccctggtgtgtctgaggagcccagtatggctgaaggatggtgaacaaggaggaaaatggggagaggcggggcagggagttcaccaggaggatcgtggggggtcttgtagaccacagcaaggattcgatcttttcacctgagtgagggaaccctggcagggctgatgtccttttctgatctctgaatgaggaggctggacatgggttatgggtcaagaagcaggagggaggagcctttggtggccttctgtgttaccatcagtcagaactttcctggccgggtgcaatgacccacgcctataagcccaggactttgggaggctgaggcaggacgattccttgagccaaggagttcaagatcagcctgggcaacatagtgagaccctgtctctacaaaaaaaaaaaaaaattattttattttttttttagataggggtcttgctttgttgaccaggctagagtgcagtggcgcaatcacagctcactgcagcctccacttcctgggctcaatcaatcttcccttctcagtctccctagcagctgggactacagccgtgcaccaccacgcctggctaatatgtctattttttgtaaagacagggactcactctgtcgcccaggctggagtgcagtggtgtgaccccagctcactgcaatctctacctccgaggttcaagcaattctcctgcctcagcctctcgagtctcactgcaacctctacctccgaggttcaagcaattctcctgcctcagcctcccgagtagctgggattacaggcgtgcaccaccatgcccagctactttttgagttttagtagagatggggtttcacaatgctggccaggctgctctcaaactcctgacctcaggtgttctgcctgcctcggcctcacaaagtgctggaattacaggcgtgagccaccatgcccagctccccccaattttttttttttttttgagacagtctcggtctgtcgcccaggctggagtacagtggcacgatctcggctcactgcaacctctgcctcccgggttcaagcgattctcctgcctcagagcctcccgagtagctgggactacaggcatgtgccaccatgcccagctaattttttgtatttttttttttagtaagaaggggtttcacagtgttagccaggatgatctcaatctcctgatcttgtgatccgcccacctcagcctcccaaagtgctgagattacaggcgtgagctaccccgtccggctaatgtttttttttttttttttttaattaggagggactgctggcatgtgtcagtaggctgaggcaggtggatcacttaagccggggaggtagaggatatagtgagccatgatcgcaccactgcattccagcctgggtgacagagggagaccctgtctgtaaaaacttttttttttttttaatttttgagacagagtctcactctgtcgcccaggctgaagtgcagtggcccaatctcggctcactgcaacctttgcctcccaggctcaagcgattctcgtgcctcagcctcccgagtagctgggactacaggcgccaaccaccacaccctgctaatttttgtattttttagtagagatggggtttcaccatgttggccagggtggtcttcaactcctgacctcaagtgatccgcccacatcggcctcccaaagtgctgggattacagccatgagccaccgcgcctggcccaaaaaaacttttaaaaagaactttttcactgcaaaaaataatcttgttgccagccgaggccaacatgcagctatgacagggcagttctctgtccttcccggcctcaggctcctctatcaaaggcccccttctctcaccttggccttgtggccttggagtagggagctgacaacaccccttctgccccaggtgaatcaatgaacaaggctgacattgtgagaataccaagcgtctgtcttcttccctcttctggcttagctcctcacctcccttggggtcagggcatctcctctttctccaggaaggggaagcgaagtcttgtgctgagaaggtgactctggaactgccactcccatgcctgtgtgactagcttctgggtggatctcagggtctaccgttgggctgggggtggatgtcatctggccactggcacccagactgcaagtaataaaaacctgactcacactggctctaccagcaagaggggatttgttggttcactgagctgaagtcagtttacatggctgacttcagatatggctggatccaggtgctgaaaaatgacagaaagcatttgccttctcagctcctcttctgtcttattctcaggtagtttctccccctcatggaggcaagattgtgccctgaagcttcagatatatattctttttttttttttttttttttttttgagacagattctagctgtgtcacccagactggaaggcaatggcccaatctcggctcactg
